(19) United States
(12) Patent Application Publication
(10) Pub. No.: US 2016/0243221 A1
(43) Pub. Date: Aug. 25, 2016

(54) COMPOSITIONS AND METHODS FOR TOLERIZING CELLULAR SYSTEMS

(71) Applicant: MODERNA THERAPEUTICS, INC., Cambridge, MA (US)

(72) Inventors: Stephen G. Hoge, Brookline, MA (US); Eric Yi-Chun Huang, Boston, MA (US)

(73) Assignee: Moderna Therapeutics, Inc., Cambridge, MA (US)

(21) Appl. No.: 15/030,097

(22) PCT Filed: Oct. 17, 2014
(86) PCT No.: PCT/US2014/061104

§ 371 Date: Apr. 18, 2016

Related U.S. Application Data
(60) Provisional application No. 61/892,556, filed on Oct. 18, 2013.

(51) Int. Cl. A61K 39/39; A61K 39/35; A61K 39/00

(52) U.S. Cl. CPC A61K 39/39; A61K 39/001; A61K 39/0008; A61K 39/35; A61K 2039/53; A61K 2039/572; A61K 2039/55516; A61K 2039/55511

(57) ABSTRACT

The invention relates to compositions and methods for the preparation, manufacture and therapeutic use of molecules for tolerizing cellular systems.

### REFERENCE TO RELATED APPLICATIONS

[0001] This application claims priority to U.S. Provisional Application No. 61/892,556 filed on Oct. 18, 2013, entitled Compositions and Methods for Tolerizing Cellular Systems, the contents of which are herein incorporated by reference in its entirety.

### REFERENCE TO SEQUENCE LISTING

[0002] The present application is being filed along with a Sequence Listing in electronic format. The Sequence Listing is provided as a file entitled M59PCT.txt, created on Oct. 17, 2014 which is 931,303 bytes in size. The information in the electronic format of the sequence listing is incorporated herein by reference in its entirety.

### FIELD OF THE INVENTION

[0003] The present invention is directed to compositions and methods for tolerizing cellular systems. Specifically, in one aspect, the invention relates to tolerogenic polynucleotides, e.g., tolerogenic modified RNA in combination with one or more antigens (which may be delivered as a tolerogenic polynucleotide) useful in tolerizing cell systems. The tolerogenic polynucleotides of the invention may encode peptides, polypeptides or multiple proteins. The tolerogenic polynucleotides or tolerogenic polypeptides, collectively tolerogenic molecules, of interest may be used in therapeutic, clinical and/or research settings.

### BACKGROUND OF THE INVENTION

[0004] Advances in the general understanding of immunomodulation have identified several drivers of tolerance and/or suppressors of adaptive immune responses. T-regulatory cells (Tregs) are critical suppressors of T effector cells and Tregs are now understood to be the critical balancers against autoimmunity and for modulating immune responses to avoid damage to self (Wing & Sagakuchi, Nat Immunol. 2010 January; 11(1):7-13).

[0005] Dendritic cells (DCs) and other antigen presenting cells (APCs) also play a critical role in presenting antigens to T cells, including Tregs. The context of these antigen presentations, including APC to T cell signaling through both cell contact (e.g., TCR/MHC2/co receptor) and non-contact (e.g., cytokines) mechanisms, can either promote tolerance or induce potent adaptive responses and high affinity T effector cell responses. These in turn can potentiate and lock in B-cell antibody responses (Watanabe et al, Autoimmunity, 1999, Vol. 31, No. 4, Pages 273-282; Luo, et al., PNAS, 2007; vol. 104; no. 8; 2821-2826).

[0006] Several mechanisms for natural modulation of the T reg vs. T effector balance towards a tolerant phenotype for self- and non-self-antigens have also been described, particularly the use of immunosuppressive cytokines, antigen presenting modulators, co-inhibitory factors and T regulatory cell epitopes (Tregitopes).

[0007] For example, several cytokines with potent anti-inflammatory profiles have been identified. These can drive polarity of the adaptive immune response towards tolerance, often through Tregs. In addition to classical examples like TGF-beta (Luo et al, PNAS, 2007, Vol. 104. No. 8, Pages 2821-2826), and IL-10 several novel families have been described including IL-12 and IL-37 (see reviews in Banchereau et al, Nature Immunology, 2012, Vol. 13, No. 10, Pages 925-931; Cheng et al, Journal of Biological Chemistry, 2011, Vol. 286, No. 20, Pages 18013-18025; Wing & Sakaguchi, Nature Immunology, 2010, Vol. 11, No. 1, Pages 7-13). In most, if not all, cases these cytokines act locally as non-contact signaling molecules between APCs and T cells or between T regs and T effector cells (T effectors).

[0008] Antigen presenting modifiers have also been identified. For example, SOCS1 mRNA can attenuate antigen presentation (Evel-Kabler et al, Journal of Clinical Investigation, 2006, Vol. 116, No. 1, Pages 90-100). Similarly several molecules have been identified that decrease MHC2 antigen presentation.

[0009] Several co-inhibitory molecules also exist which signal through contact as part of the T-cell receptor (TCR) synapse. These include ILT3, GITR, and CTLA4. ILT3 expression on monocytes and DCs has been associated with transplant acceptance in allografts (Chang et al, Nature Immunology, 2002, Vol. 3. No. 3, Pages 237-243) and delays onset of T1D in NOD-scid mice (Vlad et al, Diabetes, 2008, Vol. 57, Pages 1878-1886). See also Suciu-Foca et al, Journal of Immunology, 2007, Vol. 178, Pages 7432-7441.

[0010] T regulatory cell epitopes or Tregitopes, first identified bio-informatically as conserved epitopes on Fc regions of circulating IgG (Cousens et al, J Clin Immunol, 2012, Vol 33 Suppl 1, Pages S43-S49), have been the focus of a recent study showing some impact of co-administration of antigens and Tregs in models of autoimmune type 1 diabetes.

[0011] The gene therapy field has also made significant advances over the last decade in addressing the problem of adaptive immune responses to transgenes, both self (tolerance breaking) and non-self (no native peptide). see High, Blood, 2012, Vol 120, Pages 4482-4487.

[0012] The importance of Tregs in tolerance cannot be understated, with several specific cytokines being identified to play a role in the process to date (e.g., IL-10, TGF-beta) see Hoffman et al, Molecular Therapy, 2011, Vol. 19, No. 7, Pages 1263-1272, for example. It is crucial to note that context matters in the sense of adaptive immune function and microenvironments. For example, hepatic gene transfer can be used to induce tolerance even to non-native (e.g., human in mouse/non-human primate/canine) proteins (LoDuca et al, Curr Gene Ther, 2009, vol. 9(2), Pages 104-114; Finn et al, Blood, 2010, Vol. 116, Pages 5842-5848). Similar findings have been observed in human trials of gene therapy where pharmacological immunomodulation, including cyclosporine A, rituximab, and high dose systemic steroids, can modulate or prevent development of neutralizing antibodies (NAbs). Mingozzi et al, Molecular Therapy, 2012, Vol. 20, No. 7, Pages 1410-1416.

[0013] The specific administration locale or effective microenvironment also plays a strong role in positive outcomes and is the predominant reason that recombinant approaches are not as successful since expression is more widespread for such tolerogenic compositions. For example, systemically administered nanoparticles, including ionizable and cationic lipid nanoparticles, are usually taken up preferentially in the liver and by APCs as well as myeloid cells (DCs, monocytes) in the blood. It is envisioned that adjusting nanoparticle size and the addition of targeting epitopes can drive the preference towards APCs/DCs and away from hepatocytes. Furthermore, it is also envisioned that cell, tissue or organ specific targeting may enhance or improve tolerance. To this end, engineering microRNA binding sites into the 3′UTR of the transcript that destabilize the transcript in hepatocytes can also be used to further tune translation of the tolerogenic target towards DCs and the cells of the immune system (e.g., mir122 “knock down” in hepatocytes) and the specific antigen/transgene towards the target cells (e.g. mir142.3p “knock down” in lymphocytes).

[0014] The present invention addresses the present and long-felt need for tolerogenic compounds and/or compositions, including methods of using such compound and compositions, for the selective tuning of the adaptive immune system as interventions which expand Treg cells may offer novel treatment options in a variety of clinical settings. To this end, the present invention provides tolerogenic compositions including polynucleotides which may be used alone or in conjunction with other therapeutic modalities, including antigens, adjuvants and/or other polynucleotides (whether tolerizing or not), to alter or modulate tolerance in cellular systems. In this manner, the profile or signature of an immune system microenvironment may be fine tuned using the embodiments of the invention like a rheostat or regulator to accept or reject the presentation of one or more antigens, adjuvants or therapeutic modalities.

### SUMMARY OF THE INVENTION

[0015] Described herein are compositions, methods, processes, kits and devices for the design, preparation, manufacture and/or formulation of polynucleotides (whether protein coding or not) which function to alter the adaptive immune response of a cell or cell systems to one or more antigens, adjuvants or therapeutic modalities or to change the innate immune profile or signature of a cell or cell system in response to contact with such antigen adjuvant or therapeutic modality.

[0016] Provided herein are methods of inducing tolerance in a cell system to an antigen comprising contacting a cellular system with a tolerogenic composition comprising the antigen and one or more polynucleotides which may encode a tolerogenic polypeptide of interest.

[0017] Also provided herein are methods of inducing Treg cell activity in a cellular system comprising contacting the cellular system with a tolerogenic composition comprising an antigen and one or more polynucleotides which may encode a tolerogenic polypeptide of interest.

[0018] In one embodiment, the one or more tolerogenic polynucleotides may comprise a chemically modified mRNA and/or may encode an immunomodulatory polypeptide. The immunomodulatory polypeptide may encode an inhibitor of mTOR, IL-2, an anti-IL-2 complex, IL-10, TGF-β, IL-35, galectin-1, IL-23, IL-27, IL-35, IL-37 or antibody such as, but not limited to, an antibody reactive to CD3, CD40, CD40 ligand, CD4, and CTLA-4. The antibody may be reactive with a member

[0019] The chemically modified mRNA may comprise at least one region which is codon optimized.

[0020] The tolerogenic compositions described herein may be formulated in any formulation described herein such as, but not limited to a lipid nanoparticle (LNP). The LNP formulation may be administered by the methods described herein including, but not limited to, systemically.

[0021] Provided herein is a method of treating an autoimmune disease (e.g., lupus), inflammatory disease (e.g., colitis, Chron's disease, allergic encephalitis), allograft transplant/graft vs. host disease (GVHD), diabetes or multiple sclerosis, comprising contacting a cell, tissue or organism with a tolerogenic composition comprising an antigen and one or more polynucleotides encoding a tolerogenic polypeptide of interest.

[0022] The details of various embodiments of the invention are set forth in the description below. Other features, objects, and advantages of the invention will be apparent from the description and the drawings, and from the appended claims.

### BRIEF DESCRIPTION OF THE DRAWINGS

[0023] The foregoing and other objects, features and advantages will be apparent from the following description of particular embodiments of the invention, as illustrated in the accompanying drawings in which like reference characters refer to the same parts throughout the different views. The drawings are not necessarily to scale, emphasis instead being placed upon illustrating the principles of various embodiments of the invention.

[0024] FIG. 1 is a schematic of an IVT polynucleotide construct taught in commonly owned co-pending U.S. patent application Ser. No. 13/791,922 filed Mar. 9, 2013, the contents of which are incorporated herein by reference.

[0025] FIG. 2 is a schematic of a series of chimeric polynucleotides of the present invention. Such chimeric polynucleotides may function alone or in combination with another molecule as a polynucleotide encoding a tolerogenic polypeptide of interest.

[0026] FIG. 3 is a schematic of a series of chimeric polynucleotides illustrating various patterns of positional modifications and showing regions analogous to those regions of an mRNA polynucleotide. Such chimeric polynucleotides may function alone or in combination with another molecule as a polynucleotide encoding a tolerogenic polypeptide of interest.

[0027] FIG. 4 is a schematic of a series of chimeric polynucleotides illustrating various patterns of positional modifications based on Formula I. Such chimeric polynucleotides may function alone or in combination with another molecule as a polynucleotide encoding a tolerogenic polypeptide of interest.

[0028] FIG. 5 is a is a schematic of a series of chimeric polynucleotides illustrating various patterns of positional modifications based on Formula I and further illustrating a blocked or structured 3′ terminus. Such polynucleotides may function alone or in combination with another molecule as a polynucleotide encoding a tolerogenic polypeptide of interest.

[0029] FIG. 6 is a schematic of a circular polynucleotide construct of the present invention. Such circular polynucleotides may function alone or in combination with another molecule as a polynucleotide encoding a tolerogenic polypeptide of interest.

[0030] FIG. 7 is a schematic of a circular polynucleotide construct of the present invention. Such circular polynucleotides may function alone or in combination with another molecule as a polynucleotide encoding a tolerogenic polypeptide of interest.

[0031] FIG. 8 is a schematic of a circular polynucleotide construct of the present invention comprising at least one spacer region. Such circular polynucleotides may function alone or in combination with another molecule as a polynucleotide encoding a tolerogenic polypeptide of interest.

[0032] FIG. 9 is a schematic of a circular polynucleotide construct of the present invention comprising at least one sensor region. Such circular polynucleotides may function alone or in combination with another molecule as a polynucleotide encoding a tolerogenic polypeptide of interest.

[0033] FIG. 10 is a schematic of a circular polynucleotide construct of the present invention comprising at least one sensor region and a spacer region. Such circular polynucleotides may function alone or in combination with another molecule as a polynucleotide encoding a tolerogenic polypeptide of interest.

[0034] FIG. 11 is a schematic of a non-coding circular polynucleotide construct of the present invention. Such circular non-coding polynucleotides may function alone or in combination with another molecule as a polynucleotide encoding a tolerogenic polypeptide of interest.

[0035] FIG. 12 is a schematic of a non-coding circular polynucleotide construct of the present invention. Such circular non-coding polynucleotides may function alone or in combination with another molecule as a polynucleotide encoding a tolerogenic polypeptide of interest.

### DETAILED DESCRIPTION OF THE INVENTION

[0036] The present invention provides compositions and methods for tolerizing cellular systems, in particular for the modulation of adaptive immunity using tolerogenic molecules (e.g., tolerogenic polynucleotides which may comprise modified RNA and/or mRNA constructs), including promoting tolerance for gene therapy, improving the ability to “repeat dose” one or more polynucleotides as a therapy, and treating autoimmune diseases such as lupus, inflammatory diseases such as colitis, Chron's disease, allergic encephalitis, and/or allograft transplant/graft vs. host disease (GVHD), diabetes or multiple sclerosis.

[0037] The combination of polynucleotides encoding tolerogenic signaling polypeptides and a delivery technology (e.g., lipid nanoparticles or LNPs) with a propensity for uptake in antigen presenting cells (APCs) provides a platform for driving tolerance to specific antigens or epitopes contained therein that may be coadministered to those APCs/dendritic cells (DCs). Some practical applications of the present invention include: (1) treatment of autoimmune disease, (2) creating or improving tolerance to gene therapy transgenes, (3) creating or improving tolerance to repeat modified mRNA therapy that is immunogenic, and (4) creating or improving tolerance to allografts/transplants of solid organs.

[0038] In one embodiment, a tolerogenic composition comprising at least one polynucleotide encoding a tolerogenic polypeptide may be used as a tolerance inducing therapeutic in transplant. As a non-limiting example, harvested organs may be contacted with a tolerogenic composition through a single perfusion. As another non-limiting example, the transplant donor may be administered a tolerogenic composition comprising polynucleotides encoding tolerogenic polypeptides of interest such as tolerogenic signals based on the donor HLA haplotype to the transplant recipient.

[0039] In one embodiment, co-administration of a tolerogenic composition comprising at least one polynucleotide encoding a tolerogenic polypeptide may be used to induced tolerance and to create recipient Tregs for key donor antigens.

[0040] In another embodiment, a tolerogenic composition comprising at least one polynucleotide encoding a tolerogenic polypeptide may be used in allogenic bone marrow transplantation (BMT) to instruct tolerance for the allografted immune system in order to reduce or eliminate graft versus host disease (GVHD).

[0041] Described herein are compositions (including pharmaceutical compositions) and methods for the design, preparation, manufacture and/or formulation of polynucleotides, specifically IVT polynucleotides, chimeric polynucleotides and/or circular polynucleotides encoding at least one tolerogenic molecule and/or fragment thereof.

[0042] In some embodiments, the polynucleotides are administered in combination with one or more antigens, adjuvants or other molecule (including other tolerogenic polynucleotides) in tolerogenic compositions.

[0043] Also provided are systems, processes, devices and kits for the selection, design and/or utilization of the polynucleotides described herein.

[0044] According to the present invention, the polynucleotides are preferably modified in a manner as to avoid the deficiencies of other molecules of the art. Consequently, provided herein, therefore, are polynucleotides (also referred to as polynucleotides, irrespective of whether they are synthesized via IVT or chimeric means or whether they are linear or circular) which improve one or more of the stability and/or clearance in tissues, receptor uptake and/or kinetics, cellular access, engagement with translational machinery, mRNA half-life, translation efficiency, immune evasion, protein production capacity, secretion efficiency (when applicable), accessibility to circulation, protein half-life and/or modulation of a cell's status, function and/or activity while also functioning to modulate or alter at least one adaptive immune response of a cell or cell system.

[0045] Polynucleotides of the present invention may be administered alone or in combination with other polynucleotides encoding tolerogenic polypeptides of interest (of any type) or with other molecules to alter self or non-self responsiveness of cells or cellular systems. To this end, a first polynucleotide encoding a tolerogenic polypeptide of interest may alter the adaptive immune response to itself, its encoded polypeptide or to another distinct polynucleotide encoding a tolerogenic polypeptide of interest or the polypeptide encoded therein.

[0046] In one embodiment, provided herein are tolerogenic compositions comprising at least one antigen, adjuvant or other molecule and at least one polynucleotide encoding a tolerogenic polypeptide of interest.

[0047] In one embodiment, at least one polynucleotide encoding a tolerogenic polypeptide of interest may be formulated in a tolerogenic composition with at least one antigen, adjuvant or other molecule. The tolerogenic composition may be delivered to a cell, tissue or subject alone or in combination with other polynucleotides, adjuvants, antigens and/or other molecules.

[0048] In one embodiment, at least one polynucleotide encoding a tolerogenic polypeptide of interest may be co-administered in a tolerogenic composition with at least one antigen, adjuvant or other molecule. The polynucleotide and the antigen, adjuvant or other molecule may be formulated in the same tolerogenic composition or in distinct tolerogenic compositions. As a non-limiting example, the polynucleotide encoding a tolerogenic polypeptide of interest may be formulated in a tolerogenic composition which may also comprise at least one antigen, adjuvant or other molecule. As another non-limiting example, the polynucleotide encoding a tolerogenic polypeptide of interest may be formulated in a first tolerogenic composition and the antigen, adjuvant or other molecule may be formulated in a second tolerogenic composition. The first and second composition may be co-administered to a cell, tissue or organism.

[0049] As used herein, “co-administered” means the administration of two or more components. These components for co-administration include, but are not limited to adjuvants, antigens, active ingredients, polynucleotides, amino acids, inactive ingredients and excipients. Co-administration refers to the administration of two or more components simultaneously or with a time lapse between administration such as 1 second, 5 seconds, 10 seconds, 15 seconds, 30 seconds, 45 seconds, 1 minute, 2 minutes, 3 minutes, 4 minutes, 5 minutes, 6 minutes, 7 minutes, 8 minutes, 9 minutes, 10 minutes, 11 minutes, 12 minutes, 13 minutes, 14 minutes, 15 minutes, 16 minutes, 17 minutes, 18 minutes, 19 minutes, 20 minutes, 21 minutes, 22 minutes, 23 minutes, 24 minutes, 25 minutes, 26 minutes, 27 minutes, 28 minutes, 29 minutes, 30 minutes, 31 minutes, 32 minutes, 33 minutes, 34 minutes, 35 minutes, 36 minutes, 37 minutes, 38 minutes, 39 minutes, 40 minutes, 41 minutes, 42 minutes, 43 minutes, 44 minutes, 45 minutes, 46 minutes, 47 minutes, 48 minutes, 49 minutes, 50 minutes, 51 minutes, 52 minutes, 53 minutes, 54 minutes, 55 minutes, 56 minutes, 57 minutes, 58 minutes, 59 minutes, 1 hour, 1.5 hours, 2 hours, 2.5 hours, 3 hours, 4 hours, 5 hours, 6 hours, 7 hours, 8 hours, 9 hours, 10 hours, 11 hours, 12 hours, 13 hours, 14 hours, 15 hours, 16 hours, 17 hours, 18 hours, 19 hours, 20 hours, 21 hours, 22 hours, 23 hours, 1 day, 1.5 days, 2 days, or more than 3 days.

[0050] It is further appreciated that certain features of the present disclosure, which are, for clarity, described in the context of separate embodiments, can also be provided in combination in a single embodiment. Conversely, various features of the present disclosure which are, for brevity, described in the context of a single embodiment, can also be provided separately or in any suitable subcombination.

### I. COMPOSITIONS OF THE INVENTION

### Polynucleotides

[0051] The present invention provides nucleic acid molecules, specifically polynucleotides which, in some embodiments, encode one or more peptides or polypeptides of interest such as, but not limited to, the tolerogenic polypeptides taught herein. The term “nucleic acid,” in its broadest sense, includes any compound and/or substance that comprise a polymer of nucleotides. These polymers are often referred to as polynucleotides. When referring to polynucleotides of the invention, it should be understood that the term “polynucleotides” broadly embraces the polynucleotides encoding tolerogenic polypeptides of interest regardless of their method of synthesis (e.g., IVT or chemically synthesized or combinations thereof); structure, (e.g., linear or circular or combinations thereof); or coding capacity (e.g., protein coding or non-coding).

[0052] The polynucleotides of the present invention function to promote tolerance in cells or cellular systems, whether to self or non-self antigens. As used herein, the term “tolerance” when referring to cells or cellular systems means an antigen-specific nonresponsiveness to a challenge, where the “antigen” comprises a polynucleotide of the present invention. By non-responsiveness” it is meant that administration or contact with a specific antigen produces at least 10%, at least 20%, at least 30%, at least 40%, at least 50%, at least 60%, at least 70%, at least 80%, at least 90%, at least 95%, at least 99% or 100% reduction in responsiveness as compared to the cell or cellular response in the absence of the polynucleotide encoding a tolerogenic polypeptide of interest or the tolerogenic polypeptide. Therefore, the tolerogenic molecules of the present invention may be referred to, or considered, antigens.

[0053] Such antigen challenges may be delivered with or without an adjuvant. Adjuvants may be strong adjuvants or weak adjuvants. As used herein, the term “tolerogenic” in reference to a polynucleotide or polypeptide refers to a molecule which functions to induce, promote, or improve tolerance. Such induction, promotion or improvement may be via the modulation of the balance between Tregs and T effector cells. A polynucleotide of the invention may encode a tolerogenic polypeptide or it may encode a noncoding tolerogenic polynucleotide.

[0054] Exemplary nucleic acids or polynucleotides of the invention include, but are not limited to, ribonucleic acids (RNAs), deoxyribonucleic acids (DNAs), threose nucleic acids (TNAs), glycol nucleic acids (GNAs), peptide nucleic acids (PNAs), locked nucleic acids (LNAs, including LNA having a β-D-ribo configuration, α-LNA having an α-L-ribo configuration (a diastereomer of LNA), 2′-amino-LNA having a 2′-amino functionalization, and 2′-amino-α-LNA having a 2′-amino functionalization), ethylene nucleic acids (ENA), cyclohexenyl nucleic acids (CeNA) or hybrids or combinations thereof.

[0055] In one embodiment, polynucleotides of the present invention which are made using only in vitro transcription (IVT) enzymatic synthesis methods are referred to as “IVT polynucleotides.” Methods of making IVT polynucleotides are known in the art and are described in co-pending U.S. Provisional Patent Application Nos. 61/618,862, 61/681,645, 61/737,130, 61/618,866, 61/681,647, 61/737,134, 61/618,868, 61/681,648, 61/737,135, 61/618,870, 61/681,649, 61/737,139, 61/618,873, 61/681,650, 61/737,147, 61/618,878, 61/681,654, 61/737,152, 61/618,885, 61/681,658, 61/737,155, 61/618,896, 61/668,157, 61/681,661, 61/737,160, 61/618,911, 61/681,667, 61/737,168, 61/618,922, 61/681,675, 61/737,174, 61/618,935, 61/681,687, 61/737,184, 61/618,945, 61/681,696, 61/737,191, 61/618,953, 61/681,704, 61/737,203, 61/681,720, 61/737,213 and 61/681,742 and International Publication Nos. WO2013151666, WO2013151668, WO2013151663, WO2013151669, WO2013151670, WO2013151664, WO2013151665, WO2013151671, WO2013151672, WO2013151667 and WO2013151736; the contents of each of which are herein incorporated by reference in their entireties. In some embodiments, the antigen-specific response that is to be altered arises from a challenge to the cell or cellular system by any one of the polynucleotides or polypeptides taught therein.

[0056] In another embodiment, the polynucleotides of the present invention which have portions or regions which differ in size and/or chemical modification pattern, chemical modification position, chemical modification percent or chemical modification population and combinations of the foregoing are known as “chimeric polynucleotides.” A “chimera” according to the present invention is an entity having two or more incongruous or heterogeneous parts or regions. As used herein a “part” or “region” of a polynucleotide is defined as any portion of the polynucleotide which is less than the entire length of the polynucleotide.

[0057] In yet another embodiment, the polynucleotides of the present invention that are circular are known as “circular polynucleotides” or “circP.” As used herein, “circular polynucleotides” or “circP” means a single stranded circular polynucleotide which acts substantially like, and has the properties of, an RNA. The term “circular” is also meant to encompass any secondary or tertiary configuration of the circP.

[0058] In some embodiments, the polynucleotide includes from about 30 to about 100,000 nucleotides (e.g., from 30 to 50, from 30 to 100, from 30 to 250, from 30 to 500, from 30 to 1,000, from 30 to 1,500, from 30 to 3,000, from 30 to 5,000, from 30 to 7,000, from 30 to 10,000, from 30 to 25,000, from 30 to 50,000, from 30 to 70,000, from 100 to 250, from 100 to 500, from 100 to 1,000, from 100 to 1,500, from 100 to 3,000, from 100 to 5,000, from 100 to 7,000, from 100 to 10,000, from 100 to 25,000, from 100 to 50,000, from 100 to 70,000, from 100 to 100,000, from 500 to 1,000, from 500 to 1,500, from 500 to 2,000, from 500 to 3,000, from 500 to 5,000, from 500 to 7,000, from 500 to 10,000, from 500 to 25,000, from 500 to 50,000, from 500 to 70,000, from 500 to 100,000, from 1,000 to 1,500, from 1,000 to 2,000, from 1,000 to 3,000, from 1,000 to 5,000, from 1,000 to 7,000, from 1,000 to 10,000, from 1,000 to 25,000, from 1,000 to 50,000, from 1,000 to 70,000, from 1,000 to 100,000, from 1,500 to 3,000, from 1,500 to 5,000, from 1,500 to 7,000, from 1,500 to 10,000, from 1,500 to 25,000, from 1,500 to 50,000, from 1,500 to 70,000, from 1,500 to 100,000, from 2,000 to 3,000, from 2,000 to 5,000, from 2,000 to 7,000, from 2,000 to 10,000, from 2,000 to 25,000, from 2,000 to 50,000, from 2,000 to 70,000, and from 2,000 to 100,000).

[0059] In one embodiment, the polynucleotides of the present invention may encode at least one peptide or polypeptide of interest. In another embodiment, the polynucleotides of the present invention may be non-coding.

[0060] In one embodiment, the length of a region encoding at least one peptide polypeptide of interest of the polynucleotides present invention is greater than about 30 nucleotides in length (e.g., at least or greater than about 35, 40, 45, 50, 55, 60, 70, 80, 90, 100, 120, 140, 160, 180, 200, 250, 300, 350, 400, 450, 500, 600, 700, 800, 900, 1,000, 1,100, 1,200, 1,300, 1,400, 1,500, 1,600, 1,700, 1,800, 1,900, 2,000, 2,500, and 3,000, 4,000, 5,000, 6,000, 7,000, 8,000, 9,000, 10,000, 20,000, 30,000, 40,000, 50,000, 60,000, 70,000, 80,000, 90,000 or up to and including 100,000 nucleotides). As used herein, such a region may be referred to as a “coding region” or “region encoding.”

[0061] In one embodiment, the polynucleotides of the present invention is or functions as a messenger RNA (mRNA). As used herein, the term “messenger RNA” (mRNA) refers to any polynucleotide which encodes at least one peptide or polypeptide of interest and which is capable of being translated to produce the encoded peptide polypeptide of interest in vitro, in vivo, in situ or ex vivo.

[0062] In one embodiment, the polynucleotides of the present invention may be structurally modified or chemically modified. As used herein, a “structural” modification is one in which two or more linked nucleosides are inserted, deleted, duplicated, inverted or randomized in a polynucleotide without significant chemical modification to the nucleotides themselves. Because chemical bonds will necessarily be broken and reformed to effect a structural modification, structural modifications are of a chemical nature and hence are chemical modifications. However, structural modifications will result in a different sequence of nucleotides. For example, the polynucleotide “ATCG” may be chemically modified to “AT-5meC-G”. The same polynucleotide may be structurally modified from “ATCG” to “ATCCCG”. Here, the dinucleotide “CC” has been inserted, resulting in a structural modification to the polynucleotide.

[0063] In one embodiment, the polynucleotides of the present invention, such as IVT polynucleotides or circular polynucleotides, may have a uniform chemical modification of all or any of the same nucleoside type or a population of modifications produced by mere downward titration of the same starting modification in all or any of the same nucleoside type, or a measured percent of a chemical modification of all any of the same nucleoside type but with random incorporation, such as where all uridines are replaced by a uridine analog, e.g., pseudouridine. In another embodiment, the polynucleotides may have a uniform chemical modification of two, three, or four of the same nucleoside type throughout the entire polynucleotide (such as all uridines and all cytosines, etc. are modified in the same way).

[0064] When the polynucleotides of the present invention are chemically and/or structurally modified the polynucleotides may be referred to as “modified polynucleotides.”

[0065] In one embodiment, the polynucleotides of the present invention may include a sequence encoding a self-cleaving peptide. The self-cleaving peptide may be, but is not limited to, a 2A peptide. As a non-limiting example, the 2A peptide may have the protein sequence: GSGATNFSLLKQAGDVEENPGP (SEQ ID NO: 1), fragments or variants thereof. In one embodiment, the 2A peptide cleaves between the last glycine and last proline. As another non-limiting example, the polynucleotides of the present invention may include a polynucleotide sequence encoding the 2A peptide having the protein sequence GSGATNFSLLKQAGDVEENPGP (SEQ ID NO: 1) fragments or variants thereof.

[0066] One such polynucleotide sequence encoding the 2A peptide is GGAAGCGGAGCTACTAACTTCAGCCTGCTGAAGCAGGCTGGAGACGTGGAG GAGAACCCTGGACCT (SEQ ID NO: 2). The polynucleotide sequence of the 2A peptide may be modified or codon optimized by the methods described herein and/or are known in the art.

[0067] In one embodiment, this sequence may be used to separate the coding region of two or more polypeptides of interest. As a non-limiting example, the sequence encoding the 2A peptide may be between a first coding region A and a second coding region B (A-2Apep-B). The presence of the 2A peptide would result in the cleavage of one long protein into protein A, protein B and the 2A peptide. Protein A and protein B may be the same or different peptides or polypeptides of interest. In another embodiment, the 2A peptide may be used in the polynucleotides of the present invention to produce two, three, four, five, six, seven, eight, nine, ten or more proteins.

### IVT Polynucleotide Architecture

[0068] Traditionally, the basic components of an mRNA molecule include at least a coding region, a 5′UTR, a 3′UTR, a 5′ cap and a poly-A tail. The IVT polynucleotides of the present invention may function as mRNA but are distinguished from wild-type mRNA in their functional and/or structural design features which serve to overcome existing problems of effective polypeptide production using nucleic-acid based therapeutics.

[0069] FIG. 1 shows a primary construct 100 of an IVT polynucleotide of the present invention. As used herein, “primary construct” refers to a polynucleotide of the present invention which encodes one or more polypeptides of interest and which retains sufficient structural and/or chemical features to allow the polypeptide of interest encoded therein to be translated.

[0070] According to FIG. 1, the primary construct 100 of an IVT polynucleotide here contains a first region of linked nucleotides 102 that is flanked by a first flanking region 104 and a second flaking region 106. The first flanking region 104 may include a sequence of linked nucleosides which function as a 5′ untranslated region (UTR) such as the 5′ UTR of any of the nucleic acids encoding the native 5′UTR of the polypeptide or a non-native 5′UTR such as, but not limited to, a heterologous 5′UTR or a synthetic 5′UTR. The polypeptide of interest may comprise at its 5′ terminus one or more signal sequences encoded by a signal sequence region 103. The flanking region 104 may comprise a region of linked nucleotides comprising one or more complete or incomplete 5′ UTRs sequences. The flanking region 104 may also comprise a 5′ terminal cap 108. The second flanking region 106 may comprise a region of linked nucleotides comprising one or more complete or incomplete 3′ UTRs which may encode the native 3′ UTR of the polypeptide or a non-native 3′UTR such as, but not limited to, a heterologous 3′UTR or a synthetic 3′ UTR. The flanking region 106 may also comprise a 3′ tailing sequence 110. The 3′ tailing sequence may be, but is not limited to, a polyA tail, a polyA-G quartet and/or a stem loop sequence.

[0071] Bridging the 5′ terminus of the first region 102 and the first flanking region 104 is a first operational region 105. Traditionally this operational region comprises a Start codon. The operational region may alternatively comprise any translation initiation sequence or signal including a Start codon.

[0072] Bridging the 3′ terminus of the first region 102 and the second flanking region 106 is a second operational region 107. Traditionally this operational region comprises a Stop codon. The operational region may alternatively comprise any translation initiation sequence or signal including a Stop codon. Multiple serial stop codons may also be used in the IVT polynucleotide. In one embodiment, the operation region of the present invention may comprise two stop codons. The first stop codon may be “TGA” or “UGA” and the second stop codon may be selected from the group consisting of “TAA,” “TGA,” “TAG,” “UAA,” “UGA” or “UAG.”

[0073] The shortest length of the first region of the primary construct of the IVT polynucleotide of the present invention can be the length of a nucleic acid sequence that is sufficient to encode for a dipeptide, a tripeptide, a tetrapeptide, a pentapeptide, a hexapeptide, a heptapeptide, an octapeptide, a nonapeptide, or a decapeptide. In another embodiment, the length may be sufficient to encode a peptide of 2-30 amino acids, e.g. 5-30, 10-30, 2-25, 5-25, 10-25, or 10-20 amino acids. The length may be sufficient to encode for a peptide of at least 11, 12, 13, 14, 15, 17, 20, 25 or 30 amino acids, or a peptide that is no longer than 40 amino acids, e.g. no longer than 35, 30, 25, 20, 17, 15, 14, 13, 12, 11 or 10 amino acids. Examples of dipeptides that the polynucleotide sequences can encode or include, but are not limited to, carnosine and anserine.

[0074] The length of the first region of the primary construct of the IVT polynucleotide encoding the polypeptide of interest of the present invention is greater than about 30 nucleotides in length (e.g., at least or greater than about 35, 40, 45, 50, 55, 60, 70, 80, 90, 100, 120, 140, 160, 180, 200, 250, 300, 350, 400, 450, 500, 600, 700, 800, 900, 1,000, 1,100, 1,200, 1,300, 1,400, 1,500, 1,600, 1,700, 1,800, 1,900, 2,000, 2,500, and 3,000, 4,000, 5,000, 6,000, 7,000, 8,000, 9,000, 10,000, 20,000, 30,000, 40,000, 50,000, 60,000, 70,000, 80,000, 90,000 or up to and including 100,000 nucleotides).

[0075] In some embodiments, the IVT polynucleotide includes from about 30 to about 100,000 nucleotides (e.g., from 30 to 50, from 30 to 100, from 30 to 250, from 30 to 500, from 30 to 1,000, from 30 to 1,500, from 30 to 3,000, from 30 to 5,000, from 30 to 7,000, from 30 to 10,000, from 30 to 25,000, from 30 to 50,000, from 30 to 70,000, from 100 to 250, from 100 to 500, from 100 to 1,000, from 100 to 1,500, from 100 to 3,000, from 100 to 5,000, from 100 to 7,000, from 100 to 10,000, from 100 to 25,000, from 100 to 50,000, from 100 to 70,000, from 100 to 100,000, from 500 to 1,000, from 500 to 1,500, from 500 to 2,000, from 500 to 3,000, from 500 to 5,000, from 500 to 7,000, from 500 to 10,000, from 500 to 25,000, from 500 to 50,000, from 500 to 70,000, from 500 to 100,000, from 1,000 to 1,500, from 1,000 to 2,000, from 1,000 to 3,000, from 1,000 to 5,000, from 1,000 to 7,000, from 1,000 to 10,000, from 1,000 to 25,000, from 1,000 to 50,000, from 1,000 to 70,000, from 1,000 to 100,000, from 1,500 to 3,000, from 1,500 to 5,000, from 1,500 to 7,000, from 1,500 to 10,000, from 1,500 to 25,000, from 1,500 to 50,000, from 1,500 to 70,000, from 1,500 to 100,000, from 2,000 to 3,000, from 2,000 to 5,000, from 2,000 to 7,000, from 2,000 to 10,000, from 2,000 to 25,000, from 2,000 to 50,000, from 2,000 to 70,000, and from 2,000 to 100,000).

[0076] According to the present invention, the first and second flanking regions of the IVT polynucleotide may range independently from 15-1,000 nucleotides in length (e.g., greater than 30, 40, 45, 50, 55, 60, 70, 80, 90, 100, 120, 140, 160, 180, 200, 250, 300, 350, 400, 450, 500, 600, 700, 800, and 900 nucleotides or at least 30, 40, 45, 50, 55, 60, 70, 80, 90, 100, 120, 140, 160, 180, 200, 250, 300, 350, 400, 450, 500, 600, 700, 800, 900, and 1,000 nucleotides).

[0077] According to the present invention, the tailing sequence of the IVT polynucleotide may range from absent to 500 nucleotides in length (e.g., at least 60, 70, 80, 90, 120, 140, 160, 180, 200, 250, 300, 350, 400, 450, or 500 nucleotides). Where the tailing region is a polyA tail, the length may be determined in units of or as a function of polyA Binding Protein binding. In this embodiment, the polyA tail is long enough to bind at least 4 monomers of PolyA Binding Protein. PolyA Binding Protein monomers bind to stretches of approximately 38 nucleotides. As such, it has been observed that polyA tails of about 80 nucleotides and 160 nucleotides are functional.

[0078] According to the present invention, the capping region of the IVT polynucleotide may comprise a single cap or a series of nucleotides forming the cap. In this embodiment the capping region may be from 1 to 10, e.g. 2-9, 3-8, 4-7, 1-5, 5-10, or at least 2, or 10 or fewer nucleotides in length. In some embodiments, the cap is absent.

[0079] According to the present invention, the first and second operational regions of the IVT polynucleotide may range from 3 to 40, e.g., 5-30, 10-20, 15, or at least 4, or 30 or fewer nucleotides in length and may comprise, in addition to a Start and/or Stop codon, one or more signal and/or restriction sequences.

[0080] In one embodiment, the IVT polynucleotides of the present invention may be structurally modified or chemically modified. When the IVT polynucleotides of the present invention are chemically and/or structurally modified the polynucleotides may be referred to as “modified IVT polynucleotides.”

[0081] In one embodiment, if the IVT polynucleotides of the present invention are chemically modified they may have a uniform chemical modification of all or any of the same nucleoside type or a population of modifications produced by mere downward titration of the same starting modification in all or any of the same nucleoside type, or a measured percent of a chemical modification of all any of the same nucleoside type but with random incorporation, such as where all uridines are replaced by a uridine analog, e.g., pseudouridine. In another embodiment, the IVT polynucleotides may have a uniform chemical modification of two, three, or four of the same nucleoside type throughout the entire polynucleotide (such as all uridines and all cytosines, etc. are modified in the same way).

[0082] In one embodiment, the IVT polynucleotides of the present invention may include a sequence encoding a self-cleaving peptide, described herein, such as but not limited to the 2A peptide. The polynucleotide sequence of the 2A peptide in the IVT polynucleotide may be modified or codon optimized by the methods described herein and/or are known in the art.

[0083] In one embodiment, this sequence may be used to separate the coding region of two or more polypeptides of interest in the IVT polynucleotide.

[0084] In one embodiment, the IVT polynucleotide of the present invention may be structurally and/or chemically modified. When chemically modified and/or structurally modified the IVT polynucleotide may be referred to as a “modified IVT polynucleotide.”

[0085] In one embodiment, the IVT polynucleotide may encode at least one peptide or polypeptide of interest. In another embodiment, the IVT polynucleotide may encode two or more peptides or polypeptides of interest. Non-limiting examples of peptides or polypeptides of interest include heavy and light chains of antibodies, an enzyme and its substrate, a label and its binding molecule, a second messenger and its enzyme or the components of multimeric proteins or complexes.

[0086] IVT polynucleotides (such as, but not limited to, primary constructs), formulations and compositions comprising IVT polynucleotides, and methods of making, using and administering IVT polynucleotides are described in U.S. Provisional Patent Application Nos. 61/618,862, 61/681,645, 61/737,130, 61/618,866, 61/681,647, 61/737,134, 61/618,868, 61/681,648, 61/737,135, 61/618,870, 61/681,649, 61/737,139, 61/618,873, 61/681,650, 61/737,147, 61/618,878, 61/681,654, 61/737,152, 61/618,885, 61/681,658, 61/737,155, 61/618,896, 61/668,157, 61/681,661, 61/737,160, 61/618,911, 61/681,667, 61/737,168, 61/618,922, 61/681,675, 61/737,174, 61/618,935, 61/681,687, 61/737,184, 61/618,945, 61/681,696, 61/737,191, 61/618,953, 61/681,704, 61/737,203, 61/681,720, 61/737,213 and 61/681,742 and International Publication Nos. WO2013151666, WO2013151668, WO2013151663, WO2013151669, WO2013151670, WO2013151664, WO2013151665, WO2013151671, WO2013151672, WO2013151667 and WO2013151736; the contents of each of which are herein incorporated by reference in their entireties.

### Chimeric Polynucleotide Architecture

[0087] The chimeric polynucleotides of the present invention maintain a modular organization similar to IVT polynucleotides, but the chimeric polynucleotides comprise one or more structural and/or chemical modifications or alterations which impart useful properties to the polynucleotide. As such, the chimeric polynucleotides which are modified mRNA molecules of the present invention are termed “chimeric modified mRNA” or “chimeric mRNA.”

[0088] Chimeric polynucleotides have portions or regions which differ in size and/or chemical modification pattern, chemical modification position, chemical modification percent or chemical modification population and combinations of the foregoing.

[0089] Examples of parts or regions, where the chimeric polynucleotide functions as an mRNA and encodes a polypeptide of interest include, but are not limited to, untranslated regions (UTRs, such as the 5′ UTR or 3′ UTR), coding regions, cap regions, polyA tail regions, start regions, stop regions, signal sequence regions, and combinations thereof. FIG. 2 illustrates certain embodiments of the chimeric polynucleotides of the invention which may be used as mRNA. FIG. 3 illustrates a schematic of a series of chimeric polynucleotides identifying various patterns of positional modifications and showing regions analogous to those regions of an mRNA polynucleotide. Regions or parts that join or lie between other regions may also be designed to have subregions. These are shown in the figure.

[0090] In some embodiments, the chimeric polynucleotides of the invention have a structure comprising Formula I.

5′[Aₙ]ₓ-L1-[Bₒ]_{y}-L2-[Cₚ]_{z}-L3 3′ Formula I

[0091] wherein:

[0092] each of A and B independently comprise a region of linked nucleosides;

[0093] C is an optional region of linked nucleosides;

[0094] at least one of regions A, B, or C is positionally modified, wherein said positionally modified region comprises at least two chemically modified nucleosides of one or more of the same nucleoside type of adenosine, thymidine, guanosine, cytidine, or uridine, and wherein at least two of the chemical modifications of nucleosides of the same type are different chemical modifications;

[0095] n, o and p are independently an integer between 15-1000;

[0096] x and y are independently 1-20;

[0097] z is 0-5;

[0098] L1 and L2 are independently optional linker moieties, said linker moieties being either nucleic acid based or non-nucleic acid based; and

[0099] L3 is an optional conjugate or an optional linker moiety, said linker moiety being either nucleic acid based or non-nucleic acid based.

[0100] In some embodiments the chimeric polynucleotide of Formula I encodes one or more peptides or polypeptides of interest. Such encoded molecules may be encoded across two or more regions.

[0101] In one embodiment, at least one of the regions of linked nucleosides of A may comprise a sequence of linked nucleosides which can function as a 5′ untranslated region (UTR). The sequence of linked nucleosides may be a natural or synthetic 5′ UTR. As a non-limiting example, the chimeric polynucleotide may encode a polypeptide of interest and the sequence of linked nucleosides of A may encode the native 5′ UTR of a polypeptide encoded by the chimeric polynucleotide or the sequence of linked nucleosides may be a non-heterologous 5′ UTR such as, but not limited to a synthetic UTR.

[0102] In another embodiment, at least one of the regions of linked nucleosides of A may be a cap region. The cap region may be located 5′ to a region of linked nucleosides of A functioning as a 5′UTR. The cap region may comprise at least one cap such as, but not limited to, Cap0, Cap1, ARCA, inosine, N1-methyl-guanosine, 2′fluoro-guanosine, 7-deaza-guanosine, 8-oxo-guanosine, 2-amino-guanosine, LNA-guanosine, 2-azido-guanosine, Cap2 and Cap4.

[0103] In one embodiment, at least one of the regions of linked nucleosides of B may comprise at least one open reading frame of a nucleic acid sequence. The nucleic acid sequence may be codon optimized and/or comprise at least one modification.

[0104] In one embodiment, at least one of the regions of linked nucleosides of C may comprise a sequence of linked nucleosides which can function as a 3′ UTR. The sequence of linked nucleosides may be a natural or synthetic 3′ UTR. As a non-limiting example, the chimeric polynucleotide may encode a polypeptide of interest and the sequence of linked nucleosides of C may encode the native 3′ UTR of a polypeptide encoded by the chimeric polynucleotide or the sequence of linked nucleosides may be a non-heterologous 3′ UTR such as, but not limited to a synthetic UTR.

[0105] In one embodiment, at least one of the regions of linked nucleosides of A comprises a sequence of linked nucleosides which functions as a 5′ UTR and at least one of the regions of linked nucleosides of C comprises a sequence of linked nucleosides which functions as a 3′ UTR. In one embodiment, the 5′ UTR and the 3′ UTR may be from the same or different species. In another embodiment, the 5′ UTR and the 3′ UTR may encode the native untranslated regions from different proteins from the same or different species.

[0106] FIGS. 4 and 5 provide schematics of a series of chimeric polynucleotides illustrating various patterns of positional modifications based on Formula I as well as those having a blocked or structured 3′ terminus.

[0107] Chimeric polynucleotides, including the parts or regions thereof, of the present invention may be classified as hemimers, gapmers, wingmers, or blockmers.

[0108] As used herein, a “hemimer” is chimeric polynucleotide comprising a region or part which comprises half of one pattern, percent, position or population of a chemical modification(s) and half of a second pattern, percent, position or population of a chemical modification(s). Chimeric polynucleotides of the present invention may also comprise hemimer subregions. In one embodiment, a part or region is 50% of one and 50% of another.

[0109] In one embodiment the entire chimeric polynucleotide can be 50% of one and 50% of the other. Any region or part of any chimeric polynucleotide of the invention may be a hemimer. Types of hemimers include pattern hemimers, population hemimers or position hemimers. By definition, hemimers are 50:50 percent hemimers.

[0110] As used herein, a “gapmer” is a chimeric polynucleotide having at least three parts or regions with a gap between the parts or regions. The “gap” can comprise a region of linked nucleosides or a single nucleoside which differs from the chimeric nature of the two parts or regions flanking it. The two parts or regions of a gapmer may be the same or different from each other.

[0111] As used herein, a “wingmer” is a chimeric polynucleotide having at least three parts or regions with a gap between the parts or regions. Unlike a gapmer, the two flanking parts or regions surrounding the gap in a wingmer are the same in degree or kind. Such similarity may be in the length of number of units of different modifications or in the number of modifications. The wings of a wingmer may be longer or shorter than the gap. The wing parts or regions may be 20, 30, 40, 50, 60 70, 80, 90 or 95% greater or shorter in length than the region which comprises the gap.

[0112] As used herein, a “blockmer” is a patterned polynucleotide where parts or regions are of equivalent size or number and type of modifications. Regions or subregions in a blockmer may be 50, 51, 52, 53, 54, 55, 56, 57, 58, 59, 60, 61 62, 63, 64, 65, 66, 67, 68, 69, 70, 71, 72, 73, 74, 75, 76, 77, 78, 79, 80, 81, 82, 83, 84, 85, 86, 87, 88, 89, 90, 91, 92, 93, 94, 95, 96, 97, 98, 99, 100, 101, 102, 103, 104, 105, 106, 107, 108, 109, 110, 111, 112, 113, 114, 115, 116, 117, 118, 119, 120, 121, 122, 123, 124, 125, 126, 127, 128, 129, 130, 131, 132, 133, 134, 135, 136, 137, 138, 139, 140, 141, 142, 143, 144, 145, 146, 147, 148, 149, 150, 151, 152, 153, 154, 155, 156, 157, 158, 159, 160, 161, 162, 163, 164, 165, 166, 167, 168, 169, 170, 171, 172, 173, 174, 175, 176, 177, 178, 179, 180, 181, 182, 183, 184, 185, 186, 187, 188, 189, 190, 191, 192, 193, 194, 195, 196, 197, 198, 199, 200, 201, 202, 203, 204, 205, 206, 207, 208, 209, 210, 211, 212, 213, 214, 215, 216, 217, 218, 219, 220, 221, 222, 223, 224, 225, 226, 227, 228, 229, 230, 231, 232, 233, 234, 235, 236, 237, 238, 239, 240, 241, 242, 243, 244, 245, 246, 247, 248, 249, 250, 251, 252, 253, 254, 255, 256, 257, 258, 259, 260, 261, 262, 263, 264, 265, 266, 267, 268, 269, 270, 271, 272, 273, 274, 275, 276, 277, 278, 279, 280, 281, 282, 283, 284, 285, 286, 287, 288, 289, 290, 291, 292, 293, 294, 295, 296, 297, 298, 299, 300, 310, 320, 330, 340, 350, 360, 370, 380, 390, 400, 410, 420, 430, 440, 450, 460, 470, 480, 490 or 500, nucleosides long.

[0113] Chimeric polynucleotides, including the parts or regions thereof, of the present invention having a chemical modification pattern are referred to as “pattern chimeras.” Pattern chimeras may also be referred to as blockmers. Pattern chimeras are those polynucleotides having a pattern of modifications within, across or among regions or parts.

[0114] Patterns of modifications within a part or region are those which start and stop within a defined region. Patterns of modifications across a part or region are those patterns which start in on part or region and end in another adjacent part or region. Patterns of modifications among parts or regions are those which begin and end in one part or region and are repeated in a different part or region, which is not necessarily adjacent to the first region or part.

[0115] The regions or subregions of pattern chimeras or blockmers may have simple alternating patterns such as ABAB[AB]n where each “A” and each “B” represent different chemical modifications (at least one of the base, sugar or backbone linker), different types of chemical modifications (e.g., naturally occurring and non-naturally occurring), different percentages of modifications or different populations of modifications. The pattern may repeat n number of times where n=3-300. Further, each A or B can represent from 1-2500 units (e.g., nucleosides) in the pattern. Patterns may also be alternating multiples such as AABBAABB[AABB]n (an alternating double multiple) or AAABBBAAABBB[AAABBB]n (an alternating triple multiple) pattern. The pattern may repeat n number of times where n=3-300.

[0116] Different patterns may also be mixed together to form a second order pattern. For example, a single alternating pattern may be combined with a triple alternating pattern to form a second order alternating pattern A′B′. One example would be [ABABAB] [AAABBBAAABBB] [ABABAB] [AAABBBAAABBB] [ABABAB][AAABBBAAABBB], where [ABABAB] is A′ and [AAABBBAAABBB] is B′. In like fashion, these patterns may be repeated n number of times, where n=3-300.

[0117] Patterns may include three or more different modifications to form an ABCABC[ABC]n pattern. These three component patterns may also be multiples, such as AABBCCAABBCC[AABBCC]n and may be designed as combinations with other patterns such as ABCABCAABBCCABCABCAABBCC, and may be higher order patterns.

[0118] Regions or subregions of position, percent, and population modifications need not reflect an equal contribution from each modification type. They may form series such as “1-2-3-4”, “1-2-4-8”, where each integer represents the number of units of a particular modification type. Alternatively, they may be odd only, such as ‘1-3-3-1-3-1-5” or even only “2-4-2-4-6-4-8” or a mixture of both odd and even number of units such as “1-3-4-2-5-7-3-3-4”.

[0119] Pattern chimeras may vary in their chemical modification by degree (such as those described above) or by kind (e.g., different modifications).

[0120] Chimeric polynucleotides, including the parts or regions thereof, of the present invention having at least one region with two or more different chemical modifications of two or more nucleoside members of the same nucleoside type (A, C, G, T, or U) are referred to as “positionally modified” chimeras. Positionally modified chimeras are also referred to herein as “selective placement” chimeras or “selective placement polynucleotides”. As the name implies, selective placement refers to the design of polynucleotides which, unlike polynucleotides in the art where the modification to any A, C, G, T or U is the same by virtue of the method of synthesis, can have different modifications to the individual As, Cs, Gs, Ts or Us in a polynucleotide or region thereof. For example, in a positionally modified chimeric polynucleotide, there may be two or more different chemical modifications to any of the nucleoside types of As, Cs, Gs, Ts, or Us. There may also be combinations of two or more to any two or more of the same nucleoside type. For example, a positionally modified or selective placement chimeric polynucleotide may comprise 3 different modifications to the population of adenines in the molecule and also have 3 different modifications to the population of cytosines in the construct—all of which may have a unique, non-random, placement.

[0121] Chimeric polynucleotides, including the parts or regions thereof, of the present invention having a chemical modification percent are referred to as “percent chimeras.” Percent chimeras may have regions or parts which comprise at least 1%, at least 2%, at least 5%, at least 8%, at least 10%, at least 20%, at least 30%, at least 40%, at least 50%, at least 60%, at least 70%, at least 80%, at least 90%, at least 95%, or at least 99% positional, pattern or population of modifications. Alternatively, the percent chimera may be completely modified as to modification position, pattern, or population. The percent of modification of a percent chimera may be split between naturally occurring and non-naturally occurring modifications.

[0122] Chimeric polynucleotides, including the parts or regions thereof, of the present invention having a chemical modification population are referred to as “population chimeras.” A population chimera may comprise a region or part where nucleosides (their base, sugar or backbone linkage, or combination thereof) have a select population of modifications. Such modifications may be selected from functional populations such as modifications which induce, alter or modulate a phenotypic outcome. For example, a functional population may be a population or selection of chemical modifications which increase the level of a cytokine. Other functional populations may individually or collectively function to decrease the level of one or more cytokines. Use of a selection of these like-function modifications in a chimeric polynucleotide would therefore constitute a “functional population chimera.” As used herein, a “functional population chimera” may be one whose unique functional feature is defined by the population of modifications as described above or the term may apply to the overall function of the chimeric polynucleotide itself. For example, as a whole the chimeric polynucleotide may function in a different or superior way as compared to an unmodified or non-chimeric polynucleotide.

[0123] It should be noted that polynucleotides which have a uniform chemical modification of all of any of the same nucleoside type or a population of modifications produced by mere downward titration of the same starting modification in all of any of the same nucleoside type, or a measured percent of a chemical modification of all any of the same nucleoside type but with random incorporation, such as where all uridines are replaced by a uridine analog, e.g., pseudouridine, are not considered chimeric. Likewise, polynucleotides having a uniform chemical modification of two, three, or four of the same nucleoside type throughout the entire polynucleotide (such as all uridines and all cytosines, etc. are modified in the same way) are not considered chimeric polynucleotides. One example of a polynucleotide which is not chimeric is the canonical pseudouridine/5-methyl cytosine modified polynucleotide of the prior art. These uniform polynucleotides are arrived at entirely via in vitro transcription (IVT) enzymatic synthesis; and due to the limitations of the synthesizing enzymes, they contain only one kind of modification at the occurrence of each of the same nucleoside type, i.e., adenosine (A), thymidine (T), guanosine (G), cytidine (C) or uridine (U), found in the polynucleotide. Such polynucleotides may be characterized as IVT polynucleotides.

[0124] The chimeric polynucleotides of the present invention may be structurally modified or chemically modified. When the chimeric polynucleotides of the present invention are chemically and/or structurally modified the polynucleotides may be referred to as “modified chimeric polynucleotides.”

[0125] In some embodiments of the invention, the chimeric polynucleotides may encode two or more peptides or polypeptides of interest. Such peptides or polypeptides of interest include the heavy and light chains of antibodies, an enzyme and its substrate, a label and its binding molecule, a second messenger and its enzyme or the components of multimeric proteins or complexes.

[0126] The regions or parts of the chimeric polynucleotides of the present invention may be separated by a linker or spacer moiety. Such linkers or spaces may be nucleic acid based or non-nucleosidic.

[0127] In one embodiment, the chimeric polynucleotides of the present invention may include a sequence encoding a self-cleaving peptide described herein, such as, but not limited to, a 2A peptide. The polynucleotide sequence of the 2A peptide in the chimeric polynucleotide may be modified or codon optimized by the methods described herein and/or are known in the art.

[0128] Notwithstanding the foregoing, the chimeric polynucleotides of the present invention may comprise a region or part which is not positionally modified or not chimeric as defined herein.

[0129] For example, a region or part of a chimeric polynucleotide may be uniformly modified at one or more A, T, C, G, or U but according to the invention, the polynucleotides will not be uniformly modified throughout the entire region or part.

[0130] Regions or parts of chimeric polynucleotides may be from 15-1000 nucleosides in length and a polynucleotide may have from 2-100 different regions or patterns of regions as described herein.

[0131] In one embodiment, chimeric polynucleotides encode one or more polypeptides of interest. In another embodiment, the chimeric polynucleotides are substantially non-coding. In another embodiment, the chimeric polynucleotides have both coding and non-coding regions and parts.

[0132] FIG. 2 illustrates the design of certain chimeric polynucleotides of the present invention when based on the scaffold of the polynucleotide of FIG. 1. Shown in the figure are the regions or parts of the chimeric polynucleotides where patterned regions represent those regions which are positionally modified and open regions illustrate regions which may or may not be modified but which are, when modified, uniformly modified. Chimeric polynucleotides of the present invention may be completely positionally modified or partially positionally modified. They may also have subregions which may be of any pattern or design. Shown in FIG. 2 are a chimeric subregion and a hemimer subregion.

[0133] In one embodiment, the shortest length of a region of the polynucleotide of the present invention encoding a peptide can be the length that is sufficient to encode for a dipeptide, a tripeptide, a tetrapeptide, a pentapeptide, a hexapeptide, a heptapeptide, an octapeptide, a nonapeptide, or a decapeptide. In another embodiment, the length may be sufficient to encode a peptide of 2-30 amino acids, e.g. 5-30, 10-30, 2-25, 5-25, 10-25, or 10-20 amino acids. The length may be sufficient to encode for a peptide of at least 11, 12, 13, 14, 15, 17, 20, 25 or 30 amino acids, or a peptide that is no longer than 40 amino acids, e.g. no longer than 35, 30, 25, 20, 17, 15, 14, 13, 12, 11 or 10 amino acids. Examples of dipeptides that the polynucleotide sequences can encode or include, but are not limited to, carnosine and anserine.

[0134] In one embodiment, the length of a region of the polynucleotide of the present invention encoding the peptide or polypeptide of interest is greater than about 30 nucleotides in length (e.g., at least or greater than about 35, 40, 45, 50, 55, 60, 70, 80, 90, 100, 120, 140, 160, 180, 200, 250, 300, 350, 400, 450, 500, 600, 700, 800, 900, 1,000, 1,100, 1,200, 1,300, 1,400, 1,500, 1,600, 1,700, 1,800, 1,900, 2,000, 2,500, and 3,000, 4,000, 5,000, 6,000, 7,000, 8,000, 9,000, 10,000, 20,000, 30,000, 40,000, 50,000, 60,000, 70,000, 80,000, 90,000 or up to and including 100,000 nucleotides). As used herein, such a region may be referred to as a “coding region” or “region encoding.”

[0135] In some embodiments, the chimeric polynucleotide includes from about 30 to about 100,000 nucleotides (e.g., from 30 to 50, from 30 to 100, from 30 to 250, from 30 to 500, from 30 to 1,000, from 30 to 1,500, from 30 to 3,000, from 30 to 5,000, from 30 to 7,000, from 30 to 10,000, from 30 to 25,000, from 30 to 50,000, from 30 to 70,000, from 100 to 250, from 100 to 500, from 100 to 1,000, from 100 to 1,500, from 100 to 3,000, from 100 to 5,000, from 100 to 7,000, from 100 to 10,000, from 100 to 25,000, from 100 to 50,000, from 100 to 70,000, from 100 to 100,000, from 500 to 1,000, from 500 to 1,500, from 500 to 2,000, from 500 to 3,000, from 500 to 5,000, from 500 to 7,000, from 500 to 10,000, from 500 to 25,000, from 500 to 50,000, from 500 to 70,000, from 500 to 100,000, from 1,000 to 1,500, from 1,000 to 2,000, from 1,000 to 3,000, from 1,000 to 5,000, from 1,000 to 7,000, from 1,000 to 10,000, from 1,000 to 25,000, from 1,000 to 50,000, from 1,000 to 70,000, from 1,000 to 100,000, from 1,500 to 3,000, from 1,500 to 5,000, from 1,500 to 7,000, from 1,500 to 10,000, from 1,500 to 25,000, from 1,500 to 50,000, from 1,500 to 70,000, from 1,500 to 100,000, from 2,000 to 3,000, from 2,000 to 5,000, from 2,000 to 7,000, from 2,000 to 10,000, from 2,000 to 25,000, from 2,000 to 50,000, from 2,000 to 70,000, and from 2,000 to 100,000).

[0136] According to the present invention, regions or subregions of the chimeric polynucleotides may also range independently from 15-1,000 nucleotides in length (e.g., greater than 30, 40, 45, 50, 55, 60, 70, 80, 90, 100, 110, 120, 130, 140, 150, 160, 170, 180, 190, 200, 225, 250, 275, 300, 325, 350, 375, 400, 425, 450, 475, 500, 550, 600, 650, 700, 750, 800, 850, 900 and 950 nucleotides or at least 30, 40, 45, 50, 55, 60, 70, 80, 90, 100, 110, 120, 130, 140, 150, 160, 170, 180, 190, 200, 225, 250, 275, 300, 325, 350, 375, 400, 425, 450, 475, 500, 550, 600, 650, 700, 750, 800, 850, 900, 950 and 1,000 nucleotides).

[0137] According to the present invention, regions or subregions of chimeric polynucleotides may range from absent to 500 nucleotides in length (e.g., at least 60, 70, 80, 90, 100, 110, 120, 130, 140, 150, 160, 170, 180, 190, 200, 250, 300, 350, 400, 450, or 500 nucleotides). Where the region is a polyA tail, the length may be determined in units of or as a function of polyA Binding Protein binding. In this embodiment, the polyA tail is long enough to bind at least 4 monomers of PolyA Binding Protein. PolyA Binding Protein monomers bind to stretches of approximately 38 nucleotides. As such, it has been observed that polyA tails of about 80 nucleotides to about 160 nucleotides are functional. The chimeric polynucleotides of the present invention which function as an mRNA need not comprise a polyA tail.

[0138] According to the present invention, chimeric polynucleotides which function as an mRNA may have a capping region. The capping region may comprise a single cap or a series of nucleotides forming the cap. In this embodiment the capping region may be from 1 to 10, e.g. 2-9, 3-8, 4-7, 1-5, 5-10, or at least 2, or 10 or fewer nucleotides in length. In some embodiments, the cap is absent.

[0139] The present invention contemplates chimeric polynucleotides which are circular or cyclic. As the name implies circular polynucleotides are circular in nature meaning that the termini are joined in some fashion, whether by ligation, covalent bond, common association with the same protein or other molecule or complex or by hybridization. Any of the circular polynucleotides as taught in for example U.S. Provisional Application No. 61/873,010 filed Sep. 3, 2013, (Attorney Docket number M51.60) the contents of which are incorporated herein by reference in their entirety, may be made chimeric according to the present invention.

[0140] Chimeric polynucleotides, formulations and compositions comprising chimeric polynucleotides, and methods of making, using and administering chimeric polynucleotides are also described in co-pending U.S. Provisional Application No. 61/873,034, filed Sep. 3, 2013, entitled Chimeric Polynucleotides, and U.S. Provisional Application No. 61/877,582, filed Sep. 13, 2013, entitled Chimeric Polynucleotides; each of which is incorporated by reference in its entirety.

### Circular Polynucleotide Architecture

[0141] The present invention contemplates polynucleotides which are circular or cyclic. As the name implies circular polynucleotides are circular in nature meaning that the termini are joined in some fashion, whether by ligation, covalent bond, common association with the same protein or other molecule or complex or by hybridization. Any of the circular polynucleotides as taught in for example U.S. Provisional Application No. 61/873,010 filed Sep. 3, 2013, (Attorney Docket number M51.60) the contents of which are incorporated herein by reference in their entirety.

[0142] Circular polynucleotides of the present invention may be designed according to the circular RNA construct scaffolds shown in FIGS. 6-12. Such polynucleotides are circular polynucleotides or circular constructs.

[0143] The circular polynucleotides or circPs of the present invention which encode at least one peptide or polypeptide of interest are known as circular RNAs or circRNA. As used herein, “circular RNA” or “circRNA” means a circular polynucleotide that can encode at least one peptide or polypeptide of interest. The circPs of the present invention which comprise at least one sensor sequence and do not encode a peptide or polypeptide of interest are known as circular sponges or circSP. As used herein, “circular sponges,” “circular polynucleotide sponges” or “circSP” means a circular polynucleotide which comprises at least one sensor sequence and does not encode a polypeptide of interest. As used herein, “sensor sequence” means a receptor or pseudo-receptor for endogenous nucleic acid binding molecules. Non-limiting examples of sensor sequences include, microRNA binding sites, microRNA seed sequences, microRNA binding sites without the seed sequence, transcription factor binding sites and artificial binding sites engineered to act as pseudo-receptors and portions and fragments thereof.

[0144] The circPs of the present invention which comprise at least one sensor sequence and encode at least one peptide or polypeptide of interest are known as circular RNA sponges or circRNA-SP. As used herein, “circular RNA sponges” or “circRNA-SP” means a circular polynucleotide which comprises at least one sensor sequence and at least one region encoding at least one peptide or polypeptide of interest.

[0145] FIG. 6 shows a representative circular construct 200 of the circular polynucleotides of the present invention. As used herein, the term “circular construct” refers to a circular polynucleotide transcript which may act substantially similar to and have properties of a RNA molecule. In one embodiment the circular construct acts as an mRNA. If the circular construct encodes one or more peptides or polypeptides of interest (e.g., a circRNA or circRNA-SP) then the polynucleotide transcript retains sufficient structural and/or chemical features to allow the polypeptide of interest encoded therein to be translated. Circular constructs may be polynucleotides of the invention. When structurally or chemically modified, the construct may be referred to as a modified circP, modified circSP, modified circRNA or modified circRNA-SP.

[0146] Returning to FIG. 6, the circular construct 200 here contains a first region of linked nucleotides 202 that is flanked by a first flanking region 204 and a second flanking region 206. As used herein, the “first region” may be referred to as a “coding region,” a “non-coding region” or “region encoding” or simply the “first region.” In one embodiment, this first region may comprise nucleotides such as, but is not limited to, encoding at least one peptide or polypeptide of interest and/or nucleotides encoding a sensor region. The peptide or polypeptide of interest may comprise at its 5′ terminus one or more signal peptide sequences encoded by a signal peptide sequence region 203. The first flanking region 204 may comprise a region of linked nucleosides or portion thereof which may act similarly to an untranslated region (UTR) in a mRNA and/or DNA sequence. The first flanking region may also comprise a region of polarity 208. The region of polarity 208 may include an IRES sequence or portion thereof. As a non-limiting example, when linearlized this region may be split to have a first portion be on the 5′ terminus of the first region 202 and second portion be on the 3′ terminus of the first region 202. The second flanking region 206 may comprise a tailing sequence region 210 and may comprise a region of linked nucleotides or portion thereof 212 which may act similarly to a UTR in a mRNA and/or DNA.

[0147] Bridging the 5′ terminus of the first region 202 and the first flanking region 204 is a first operational region 205. In one embodiment, this operational region may comprise a start codon. The operational region may alternatively comprise any translation initiation sequence or signal including a start codon.

[0148] Bridging the 3′ terminus of the first region 202 and the second flanking region 206 is a second operational region 207. Traditionally this operational region comprises a stop codon. The operational region may alternatively comprise any translation initiation sequence or signal including a stop codon. According to the present invention, multiple serial stop codons may also be used. In one embodiment, the operation region of the present invention may comprise two stop codons. The first stop codon may be “TGA” or “UGA” and the second stop codon may be selected from the group consisting of “TAA,” “TGA,” “TAG,” “UAA,” “UGA” or “UAG.”

[0149] Turning to FIG. 7, at least one non-nucleic acid moiety 201 may be used to prepare a circular construct 200 where the non-nucleic acid moiety 201 is used to bring the first flanking region 204 near the second flanking region 206. Non-limiting examples of non-nucleic acid moieties which may be used in the present invention are described herein. The circular construct 200 may comprise more than one non-nucleic acid moiety wherein the additional non-nucleic acid moieties may be heterologous or homologous to the first non-nucleic acid moiety.

[0150] Turning to FIG. 8, the first region of linked nucleosides 202 may comprise a spacer region 214. This spacer region 214 may be used to separate the first region of linked nucleosides 202 so that the circular construct can include more than one open reading frame, non-coding region or an open reading frame and a non-coding region.

[0151] Turning to FIG. 9, the second flanking region 206 may comprise one or more sensor regions 216 in the 3′UTR 212. These sensor sequences as discussed herein operate as pseudo-receptors (or binding sites) for ligands of the local microenvironment of the circular construct. For example, microRNA binding sites or miRNA seeds may be used as sensors such that they function as pseudoreceptors for any microRNAs present in the environment of the circular polynucleotide. As shown in FIG. 9, the one or more sensor regions 216 may be separated by a spacer region 214.

[0152] As shown in FIG. 10, a circular construct 200, which includes one or more sensor regions 216, may also include a spacer region 214 in the first region of linked nucleosides 202. As discussed above for FIG. 7, this spacer region 214 may be used to separate the first region of linked nucleosides 202 so that the circular construct can include more than one open reading frame and/or more than one non-coding region.

[0153] Turning to FIG. 11, a circular construct 200 may be a non-coding construct known as a circSP comprising at least one non-coding region such as, but not limited to, a sensor region 216. Each of the sensor regions 216 may include, but are not limited to, a miR sequence, a miR seed, a miR binding site and/or a miR sequence without the seed.

[0154] Turning to FIG. 12, at least one non-nucleic acid moiety 201 may be used to prepare a circular construct 200 which is a non-coding construct. The circular construct 200 which is a non-coding construct may comprise more than one non-nucleic acid moiety wherein the additional non-nucleic acid moieties may be heterologous or homologous to the first non-nucleic acid moiety.

[0155] Circular polynucleotides, formulations and compositions comprising circular polynucleotides, and methods of making, using and administering circular polynucleotides are also described in co-pending U.S. Provisional Application No. 61/873,010, filed Sep. 3, 2013, entitled Circular Polynucleotides, and U.S. Provisional Application No. 61/877,527, filed Sep. 13, 2013, entitled Circular Polynucleotides; each of which is incorporated by reference in its entirety.

### Multimers of Polynucleotides

[0156] According to the present invention, multiple distinct chimeric polynucleotides and/or IVT polynucleotides may be linked together through the 3′-end using nucleotides which are modified at the 3′-terminus. Chemical conjugation may be used to control the stoichiometry of delivery into cells. For example, the glyoxylate cycle enzymes, isocitrate lyase and malate synthase, may be supplied into cells at a 1:1 ratio to alter cellular fatty acid metabolism. This ratio may be controlled by chemically linking chimeric polynucleotides and/or IVT polynucleotides using a 3′-azido terminated nucleotide on one polynucleotides species and a C5-ethynyl or alkynyl-containing nucleotide on the opposite polynucleotide species. The modified nucleotide is added post-transcriptionally using terminal transferase (New England Biolabs, Ipswich, Mass.) according to the manufacturer's protocol. After the addition of the 3′-modified nucleotide, the two polynucleotides species may be combined in an aqueous solution, in the presence or absence of copper, to form a new covalent linkage via a click chemistry mechanism as described in the literature.

[0157] In another example, more than two chimeric polynucleotides and/or IVT polynucleotides may be linked together using a functionalized linker molecule. For example, a functionalized saccharide molecule may be chemically modified to contain multiple chemical reactive groups (SH—, NH₂—, N₃, etc. . . . ) to react with the cognate moiety on a 3′-functionalized mRNA molecule (i.e., a 3′-maleimide ester, 3′-NHS-ester, alkynyl). The number of reactive groups on the modified saccharide can be controlled in a stoichiometric fashion to directly control the stoichiometric ratio of conjugated chimeric polynucleotides and/or IVT polynucleotides.

[0158] In one embodiment, the chimeric polynucleotides and/or IVT polynucleotides may be linked together in a pattern. The pattern may be a simple alternating pattern such as CD[CD]ₓ where each “C” and each “D” represent a chimeric polynucleotide, IVT polynucleotide, different chimeric polynucleotides or different IVT polynucleotides. The pattern may repeat x number of times, where x=1-300. Patterns may also be alternating multiples such as CCDD[CCDD]ₓ (an alternating double multiple) or CCCDDD[CCCDDD]ₓ (an alternating triple multiple) pattern. The alternating double multiple or alternating triple multiple may repeat x number of times, where x=1-300.

### Conjugates and Combinations of Polynucleotides

[0159] In order to further enhance protein production, polynucleotides of the present invention can be designed to be conjugated to other polynucleotides, dyes, intercalating agents (e.g. acridines), cross-linkers (e.g. psoralene, mitomycin C), porphyrins (TPPC4, texaphyrin, Sapphyrin), polycyclic aromatic hydrocarbons (e.g., phenazine, dihydrophenazine), artificial endonucleases (e.g. EDTA), alkylating agents, phosphate, amino, mercapto, PEG (e.g., PEG-40K), MPEG, [MPEG]₂, polyamino, alkyl, substituted alkyl, radiolabeled markers, enzymes, haptens (e.g. biotin), transport/absorption facilitators (e.g., aspirin, vitamin E, folic acid), synthetic ribonucleases, proteins, e.g., glycoproteins, or peptides, e.g., molecules having a specific affinity for a co-ligand, or antibodies e.g., an antibody, that binds to a specified cell type such as a cancer cell, endothelial cell, or bone cell, hormones and hormone receptors, non-peptidic species, such as lipids, lectins, carbohydrates, vitamins, cofactors, or a drug.

[0160] Conjugation may result in increased stability and/or half life and may be particularly useful in targeting the polynucleotides to specific sites in the cell, tissue or organism.

[0161] According to the present invention, the polynucleotides may be administered with, conjugated to or further encode one or more of RNAi agents, siRNAs, shRNAs, miRNAs, miRNA binding sites, antisense RNAs, ribozymes, catalytic DNA, tRNA, RNAs that induce triple helix formation, aptamers or vectors, and the like.

[0162] The nanoparticle formulations may comprise a phosphate conjugate. The phosphate conjugate may increase in vivo circulation times and/or increase the targeted delivery of the nanoparticle. Phosphate conjugates for use with the present invention may be made by the methods described in International Application No. WO2013033438 or US Patent Publication No. US20130196948, the contents of each of which are herein incorporated by reference in its entirety. As a non-limiting example, the phosphate conjugates may include a compound of any one of the formulas described in International Application No. WO2013033438, herein incorporated by reference in its entirety.

[0163] The nanoparticle formulation may comprise a polymer conjugate. The polymer conjugate may be a water soluble conjugate. The polymer conjugate may have a structure as described in U.S. Patent Application No. 20130059360, the contents of which are herein incorporated by reference in its entirety. In one aspect, polymer conjugates with the polynucleotides of the present invention may be made using the methods and/or segmented polymeric reagents described in U.S. Patent Application No. 20130072709, herein incorporated by reference in its entirety. In another aspect, the polymer conjugate may have pendant side groups comprising ring moieties such as, but not limited to, the polymer conjugates described in US Patent Publication No. US20130196948, the contents of which is herein incorporated by reference in its entirety.

[0164] The nanoparticle formulations may comprise a conjugate to enhance the delivery of nanoparticles of the present invention in a subject. Further, the conjugate may inhibit phagocytic clearance of the nanoparticles in a subject. In one aspect, the conjugate may be a “self” peptide designed from the human membrane protein CD47 (e.g., the “self” particles described by Rodriguez et al (Science 2013 339, 971-975), herein incorporated by reference in its entirety). As shown by Rodriguez et al. the self peptides delayed macrophage-mediated clearance of nanoparticles which enhanced delivery of the nanoparticles. In another aspect, the conjugate may be the membrane protein CD47 (e.g., see Rodriguez et al. Science 2013 339, 971-975, herein incorporated by reference in its entirety). Rodriguez et al. showed that, similarly to “self” peptides, CD47 can increase the circulating particle ratio in a subject as compared to scrambled peptides and PEG coated nanoparticles.

[0165] In one embodiment, the polynucleotides of the present invention are formulated in nanoparticles which comprise a conjugate to enhance the delivery of the nanoparticles of the present invention in a subject. The conjugate may be the CD47 membrane or the conjugate may be derived from the CD47 membrane protein, such as the “self” peptide described previously. In another aspect the nanoparticle may comprise PEG and a conjugate of CD47 or a derivative thereof. In yet another aspect, the nanoparticle may comprise both the “self” peptide described above and the membrane protein CD47.

[0166] In another aspect, a “self” peptide and/or CD47 protein may be conjugated to a virus-like particle or pseudovirion, as described herein for delivery of the polynucleotides of the present invention.

[0167] In another embodiment, pharmaceutical compositions comprising the polynucleotides of the present invention and a conjugate which may have a degradable linkage. Non-limiting examples of conjugates include an aromatic moiety comprising an ionizable hydrogen atom, a spacer moiety, and a water-soluble polymer. As a non-limiting example, pharmaceutical compositions comprising a conjugate with a degradable linkage and methods for delivering such pharmaceutical compositions are described in US Patent Publication No. US20130184443, the contents of which are herein incorporated by reference in its entirety.

### Bifunctional Polynucleotides

[0168] In one embodiment of the invention are bifunctional polynucleotides (e.g., bifunctional IVT polynucleotides, bifunctional chimeric polynucleotides or bifunctional circular polynucleotides). As the name implies, bifunctional polynucleotides are those having or capable of at least two functions. These molecules may also by convention be referred to as multi-functional.

[0169] The multiple functionalities of bifunctional polynucleotides may be encoded by the RNA (the function may not manifest until the encoded product is translated) or may be a property of the polynucleotide itself. It may be structural or chemical. Bifunctional modified polynucleotides may comprise a function that is covalently or electrostatically associated with the polynucleotides. Further, the two functions may be provided in the context of a complex of a chimeric polynucleotide and another molecule.

[0170] Bifunctional polynucleotides may encode peptides which are anti-proliferative. These peptides may be linear, cyclic, constrained or random coil. They may function as aptamers, signaling molecules, ligands or mimics or mimetics thereof. Anti-proliferative peptides may, as translated, be from 3 to 50 amino acids in length. They may be 5-40, 10-30, or approximately 15 amino acids long. They may be single chain, multichain or branched and may form complexes, aggregates or any multi-unit structure once translated.

### Noncoding Polynucleotides

[0171] As described herein, provided are polynucleotides having sequences that are partially or substantially not translatable, e.g., having a noncoding region. As one non-limiting example, the noncoding region may be the first region of the IVT polynucleotide or the circular polynucleotide. Alternatively, the noncoding region may be a region other than the first region. As another non-limiting example, the noncoding region may be the A, B and/or C region of the chimeric polynucleotide.

[0172] Such molecules are generally not translated, but can exert an effect on protein production by one or more of binding to and sequestering one or more translational machinery components such as a ribosomal protein or a transfer RNA (tRNA), thereby effectively reducing protein expression in the cell or modulating one or more pathways or cascades in a cell which in turn alters protein levels. The polynucleotide may contain or encode one or more long noncoding RNA (lncRNA, or lincRNA) or portion thereof, a small nucleolar RNA (sno-RNA), micro RNA (miRNA), small interfering RNA (siRNA) or Piwi-interacting RNA (piRNA). Examples of such lncRNA molecules and RNAi constructs designed to target such lncRNA any of which may be encoded in the polynucleotides are taught in International Publication, WO2012/018881 A2, the contents of which are incorporated herein by reference in their entirety.

### Tolerogenic Polypeptides of Interest

[0173] Polynucleotides of the present invention may encode one or more tolerogenic peptides or polypeptides of interest. They may also affect the levels, signaling or function of one or more peptides or polypeptides. Tolerogenic polypeptides of interest, according to the present invention include any of those taught in, for example, those listed in Table 6 of U.S. Provisional Patent Application Nos. 61/618,862, 61/681,645, 61/737,130, 61/618,866, 61/681,647, 61/737,134, 61/618,868, 61/681,648, 61/737,135, 61/618,873, 61/681,650, 61/737,147, 61/618,878, 61/681,654, 61/737,152, 61/618,885, 61/681,658, 61/737,155, 61/618,896, 61/668,157, 61/681,661, 61/737,160, 61/618,911, 61/681,667, 61/737,168, 61/618,922, 61/681,675, 61/737,174, 61/618,935, 61/681,687, 61/737,184, 61/618,945, 61/681,696, 61/737,191, 61/618,953, 61/681,704, 61/737,203; Table 6 and 7 of U.S. Provisional Patent Application Nos. 61/681,720, 61/737,213, 61/681,742; Table 6 of International Publication Nos. WO2013151666, WO2013151668, WO2013151663, WO2013151669, WO2013151670, WO2013151664, WO2013151665, WO2013151736; Tables 6 and 7 International Publication No. WO2013151672; Tables 6, 178 and 179 of International Publication No. WO2013151671; Tables 6, 28 and 29 of U.S. Provisional Patent Application No. 61/618,870; Tables 6, 56 and 57 of U.S. Provisional Patent Application No. 61/681,649; Tables 6, 186 and 187 U.S. Provisional Patent Application No. 61/737,139; Tables 6, 185 and 186 of International Publication No WO2013151667; the contents of each of which are herein incorporated by reference in their entireties.

[0174] According to the present invention, the polynucleotide may be designed to encode one or more polypeptides of interest or fragments thereof. Such polypeptide of interest may include, but is not limited to, whole polypeptides, a plurality of polypeptides or fragments of polypeptides, which independently may be encoded by one or more regions or parts or the whole of a polynucleotide. As used herein, the term “polypeptides of interest” refer to any polypeptide which is selected to be encoded within, or whose function is affected by, the polynucleotides of the present invention.

[0175] As used herein, “polypeptide” means a polymer of amino acid residues (natural or unnatural) linked together most often by peptide bonds. The term, as used herein, refers to proteins, polypeptides, and peptides of any size, structure, or function. In some instances the polypeptide encoded is smaller than about 50 amino acids and the polypeptide is then termed a peptide. If the polypeptide is a peptide, it will be at least about 2, 3, 4, or at least 5 amino acid residues long. Thus, polypeptides include gene products, naturally occurring polypeptides, synthetic polypeptides, homologs, orthologs, paralogs, fragments and other equivalents, variants, and analogs of the foregoing. A polypeptide may be a single molecule or may be a multi-molecular complex such as a dimer, trimer or tetramer. They may also comprise single chain or multichain polypeptides such as antibodies or insulin and may be associated or linked. Most commonly disulfide linkages are found in multichain polypeptides. The term polypeptide may also apply to amino acid polymers in which one or more amino acid residues are an artificial chemical analogue of a corresponding naturally occurring amino acid.

[0176] The term “polypeptide variant” refers to molecules which differ in their amino acid sequence from a native or reference sequence. The amino acid sequence variants may possess substitutions, deletions, and/or insertions at certain positions within the amino acid sequence, as compared to a native or reference sequence. Ordinarily, variants will possess at least about 50% identity (homology), at least about 60% identity, at least about 70% identity, at least about 80% identity, at least about 90% identity, at least about 95% identity, at least about 99% identity to a native or reference sequence, and preferably, they will be at least about 80%, more preferably at least about 90% identical (homologous) to a native or reference sequence.

[0177] In some embodiments “variant mimics” are provided. As used herein, the term “variant mimic” is one which contains one or more amino acids which would mimic an activated sequence. For example, glutamate may serve as a mimic for phosphoro-threonine and/or phosphoro-serine. Alternatively, variant mimics may result in deactivation or in an inactivated product containing the mimic, e.g., phenylalanine may act as an inactivating substitution for tyrosine; or alanine may act as an inactivating substitution for serine.

[0178] “Homology” as it applies to amino acid sequences is defined as the percentage of residues in the candidate amino acid sequence that are identical with the residues in the amino acid sequence of a second sequence after aligning the sequences and introducing gaps, if necessary, to achieve the maximum percent homology. Methods and computer programs for the alignment are well known in the art. It is understood that homology depends on a calculation of percent identity but may differ in value due to gaps and penalties introduced in the calculation.

[0179] By “homologs” as it applies to polypeptide sequences means the corresponding sequence of other species having substantial identity to a second sequence of a second species.

[0180] “Analogs” is meant to include polypeptide variants which differ by one or more amino acid alterations, e.g., substitutions, additions or deletions of amino acid residues that still maintain one or more of the properties of the parent or starting polypeptide.

[0181] The present invention contemplates several types of compositions which are polypeptide based including variants and derivatives. These include substitutional, insertional, deletion and covalent variants and derivatives. The term “derivative” is used synonymously with the term “variant” but generally refers to a molecule that has been modified and/or changed in any way relative to a reference molecule or starting molecule.

[0182] As such, polynucleotides encoding peptides or polypeptides containing substitutions, insertions and/or additions, deletions and covalent modifications with respect to reference sequences, in particular the polypeptide sequences disclosed herein, are included within the scope of this invention. For example, sequence tags or amino acids, such as one or more lysines, can be added to the peptide sequences of the invention (e.g., at the N-terminal or C-terminal ends). Sequence tags can be used for peptide purification or localization. Lysines can be used to increase peptide solubility or to allow for biotinylation. Alternatively, amino acid residues located at the carboxy and amino terminal regions of the amino acid sequence of a peptide or protein may optionally be deleted providing for truncated sequences. Certain amino acids (e.g., C-terminal or N-terminal residues) may alternatively be deleted depending on the use of the sequence, as for example, expression of the sequence as part of a larger sequence which is soluble, or linked to a solid support.

[0183] “Substitutional variants” when referring to polypeptides are those that have at least one amino acid residue in a native or starting sequence removed and a different amino acid inserted in its place at the same position. The substitutions may be single, where only one amino acid in the molecule has been substituted, or they may be multiple, where two or more amino acids have been substituted in the same molecule.

[0184] As used herein the term “conservative amino acid substitution” refers to the substitution of an amino acid that is normally present in the sequence with a different amino acid of similar size, charge, or polarity. Examples of conservative substitutions include the substitution of a non-polar (hydrophobic) residue such as isoleucine, valine and leucine for another non-polar residue. Likewise, examples of conservative substitutions include the substitution of one polar (hydrophilic) residue for another such as between arginine and lysine, between glutamine and asparagine, and between glycine and serine. Additionally, the substitution of a basic residue such as lysine, arginine or histidine for another, or the substitution of one acidic residue such as aspartic acid or glutamic acid for another acidic residue are additional examples of conservative substitutions. Examples of non-conservative substitutions include the substitution of a non-polar (hydrophobic) amino acid residue such as isoleucine, valine, leucine, alanine, methionine for a polar (hydrophilic) residue such as cysteine, glutamine, glutamic acid or lysine and/or a polar residue for a non-polar residue.

[0185] “Insertional variants” when referring to polypeptides are those with one or more amino acids inserted immediately adjacent to an amino acid at a particular position in a native or starting sequence. “Immediately adjacent” to an amino acid means connected to either the alpha-carboxy or alpha-amino functional group of the amino acid.

[0186] “Deletional variants” when referring to polypeptides are those with one or more amino acids in the native or starting amino acid sequence removed. Ordinarily, deletional variants will have one or more amino acids deleted in a particular region of the molecule.

[0187] “Covalent derivatives” when referring to polypeptides include modifications of a native or starting protein with an organic proteinaceous or non-proteinaceous derivatizing agent, and/or post-translational modifications. Covalent modifications are traditionally introduced by reacting targeted amino acid residues of the protein with an organic derivatizing agent that is capable of reacting with selected side-chains or terminal residues, or by harnessing mechanisms of post-translational modifications that function in selected recombinant host cells. The resultant covalent derivatives are useful in programs directed at identifying residues important for biological activity, for immunoassays, or for the preparation of anti-protein antibodies for immunoaffinity purification of the recombinant glycoprotein. Such modifications are within the ordinary skill in the art and are performed without undue experimentation.

[0188] Certain post-translational modifications are the result of the action of recombinant host cells on the expressed polypeptide. Glutaminyl and asparaginyl residues are frequently post-translationally deamidated to the corresponding glutamyl and aspartyl residues. Alternatively, these residues are deamidated under mildly acidic conditions. Either form of these residues may be present in the polypeptides produced in accordance with the present invention.

[0189] Other post-translational modifications include hydroxylation of proline and lysine, phosphorylation of hydroxyl groups of seryl or threonyl residues, methylation of the alpha-amino groups of lysine, arginine, and histidine side chains (T. E. Creighton, Proteins: Structure and Molecular Properties, W.H. Freeman & Co., San Francisco, pp. 79-86 (1983)).

[0190] “Features” when referring to polypeptides are defined as distinct amino acid sequence-based components of a molecule. Features of the polypeptides encoded by the polynucleotides of the present invention include surface manifestations, local conformational shape, folds, loops, half-loops, domains, half-domains, sites, termini or any combination thereof.

[0191] As used herein when referring to polypeptides the term “surface manifestation” refers to a polypeptide based component of a protein appearing on an outermost surface.

[0192] As used herein when referring to polypeptides the term “local conformational shape” means a polypeptide based structural manifestation of a protein which is located within a definable space of the protein.

[0193] As used herein when referring to polypeptides the term “fold” refers to the resultant conformation of an amino acid sequence upon energy minimization. A fold may occur at the secondary or tertiary level of the folding process. Examples of secondary level folds include beta sheets and alpha helices. Examples of tertiary folds include domains and regions formed due to aggregation or separation of energetic forces. Regions formed in this way include hydrophobic and hydrophilic pockets, and the like.

[0194] As used herein the term “turn” as it relates to protein conformation means a bend which alters the direction of the backbone of a peptide or polypeptide and may involve one, two, three or more amino acid residues.

[0195] As used herein when referring to polypeptides the term “loop” refers to a structural feature of a polypeptide which may serve to reverse the direction of the backbone of a peptide or polypeptide. Where the loop is found in a polypeptide and only alters the direction of the backbone, it may comprise four or more amino acid residues. Oliva et al. have identified at least 5 classes of protein loops (J. Mol Biol 266 (4): 814-830; 1997). Loops may be open or closed. Closed loops or “cyclic” loops may comprise 2, 3, 4, 5, 6, 7, 8, 9, 10 or more amino acids between the bridging moieties. Such bridging moieties may comprise a cysteine-cysteine bridge (Cys-Cys) typical in polypeptides having disulfide bridges or alternatively bridging moieties may be non-protein based such as the dibromozylyl agents used herein.

[0196] As used herein when referring to polypeptides the term “half-loop” refers to a portion of an identified loop having at least half the number of amino acid resides as the loop from which it is derived. It is understood that loops may not always contain an even number of amino acid residues. Therefore, in those cases where a loop contains or is identified to comprise an odd number of amino acids, a half-loop of the odd-numbered loop will comprise the whole number portion or next whole number portion of the loop (number of amino acids of the loop/2+/−0.5 amino acids). For example, a loop identified as a 7 amino acid loop could produce half-loops of 3 amino acids or 4 amino acids (7/2=3.5+/−0.5 being 3 or 4).

[0197] As used herein when referring to polypeptides the term “domain” refers to a motif of a polypeptide having one or more identifiable structural or functional characteristics or properties (e.g., binding capacity, serving as a site for protein-protein interactions).

[0198] As used herein when referring to polypeptides the term “half-domain” means a portion of an identified domain having at least half the number of amino acid resides as the domain from which it is derived. It is understood that domains may not always contain an even number of amino acid residues. Therefore, in those cases where a domain contains or is identified to comprise an odd number of amino acids, a half-domain of the odd-numbered domain will comprise the whole number portion or next whole number portion of the domain (number of amino acids of the domain/2+/−0.5 amino acids). For example, a domain identified as a 7 amino acid domain could produce half-domains of 3 amino acids or 4 amino acids (7/2=3.5+/−0.5 being 3 or 4). It is also understood that sub-domains may be identified within domains or half-domains, these subdomains possessing less than all of the structural or functional properties identified in the domains or half domains from which they were derived. It is also understood that the amino acids that comprise any of the domain types herein need not be contiguous along the backbone of the polypeptide (i.e., nonadjacent amino acids may fold structurally to produce a domain, half-domain or subdomain).

[0199] As used herein when referring to polypeptides the terms “site” as it pertains to amino acid based embodiments is used synonymously with “amino acid residue” and “amino acid side chain.” A site represents a position within a peptide or polypeptide that may be modified, manipulated, altered, derivatized or varied within the polypeptide based molecules of the present invention.

[0200] As used herein the terms “termini” or “terminus” when referring to polypeptides refers to an extremity of a peptide or polypeptide. Such extremity is not limited only to the first or final site of the peptide or polypeptide but may include additional amino acids in the terminal regions. The polypeptide based molecules of the present invention may be characterized as having both an N-terminus (terminated by an amino acid with a free amino group (NH2)) and a C-terminus (terminated by an amino acid with a free carboxyl group (COOH)). Proteins of the invention are in some cases made up of multiple polypeptide chains brought together by disulfide bonds or by non-covalent forces (multimers, oligomers). These sorts of proteins will have multiple N- and C-termini. Alternatively, the termini of the polypeptides may be modified such that they begin or end, as the case may be, with a non-polypeptide based moiety such as an organic conjugate.

[0201] Once any of the features have been identified or defined as a desired component of a polypeptide to be encoded by the polynucleotide of the invention, any of several manipulations and/or modifications of these features may be performed by moving, swapping, inverting, deleting, randomizing or duplicating. Furthermore, it is understood that manipulation of features may result in the same outcome as a modification to the molecules of the invention. For example, a manipulation which involved deleting a domain would result in the alteration of the length of a molecule just as modification of a nucleic acid to encode less than a full length molecule would.

[0202] Modifications and manipulations can be accomplished by methods known in the art such as, but not limited to, site directed mutagenesis or a priori incorporation during chemical synthesis. The resulting modified molecules may then be tested for activity using in vitro or in vivo assays such as those described herein or any other suitable screening assay known in the art.

[0203] According to the present invention, the polypeptides may comprise a consensus sequence which is discovered through rounds of experimentation. As used herein a “consensus” sequence is a single sequence which represents a collective population of sequences allowing for variability at one or more sites.

[0204] As recognized by those skilled in the art, protein fragments, functional protein domains, and homologous proteins are also considered to be within the scope of polypeptides of interest of this invention. For example, provided herein is any protein fragment (meaning a polypeptide sequence at least one amino acid residue shorter than a reference polypeptide sequence but otherwise identical) of a reference protein 10, 20, 30, 40, 50, 60, 70, 80, 90, 100 or greater than 100 amino acids in length. In another example, any protein that includes a stretch of about 20, about 30, about 40, about 50, or about 100 amino acids which are about 40%, about 50%, about 60%, about 70%, about 80%, about 90%, about 95%, or about 100% identical to any of the sequences described herein can be utilized in accordance with the invention. In certain embodiments, a polypeptide to be utilized in accordance with the invention includes 2, 3, 4, 5, 6, 7, 8, 9, 10, or more mutations as shown in any of the sequences provided or referenced herein.

### Types of Polypeptides of Interest

[0205] The polynucleotides of the present invention may be designed to encode tolerogenic polypeptides of interest.

[0206] In one embodiment, polynucleotides may encode variant polypeptides which have a certain identity with a reference polypeptide sequence. As used herein, a “reference polypeptide sequence” refers to a starting polypeptide sequence. Reference sequences may be wild type sequences or any sequence to which reference is made in the design of another sequence. A “reference polypeptide sequence” may, e.g., be any one of those polypeptides disclosed in Table 6 of U.S. Provisional Patent Application Nos. 61/618,862, 61/681,645, 61/737,130, 61/618,866, 61/681,647, 61/737,134, 61/618,868, 61/681,648, 61/737,135, 61/618,873, 61/681,650, 61/737,147, 61/618,878, 61/681,654, 61/737,152, 61/618,885, 61/681,658, 61/737,155, 61/618,896, 61/668,157, 61/681,661, 61/737,160, 61/618,911, 61/681,667, 61/737,168, 61/618,922, 61/681,675, 61/737,174, 61/618,935, 61/681,687, 61/737,184, 61/618,945, 61/681,696, 61/737,191, 61/618,953, 61/681,704, 61/737,203; Table 6 and 7 of U.S. Provisional Patent Application Nos. 61/681,720, 61/737,213, 61/681,742; Table 6 of International Publication Nos. WO2013151666, WO2013151668, WO2013151663, WO2013151669, WO2013151670, WO2013151664, WO2013151665, WO2013151736; Tables 6 and 7 International Publication No. WO2013151672; Tables 6, 178 and 179 of International Publication No. WO2013151671; Tables 6, 28 and 29 of U.S. Provisional Patent Application No. 61/618,870; Tables 6, 56 and 57 of U.S. Provisional Patent Application No. 61/681,649; Tables 6, 186 and 187 U.S. Provisional Patent Application No. 61/737,139; Tables 6, 185 and 186 of International Publication No WO2013151667; the contents of each of which are herein incorporated by reference in their entireties.

[0207] Reference molecules (polypeptides or polynucleotides) may share a certain identity with the designed molecules (polypeptides or polynucleotides). The term “identity” as known in the art, refers to a relationship between the sequences of two or more peptides, polypeptides or polynucleotides, as determined by comparing the sequences. In the art, identity also means the degree of sequence relatedness between them as determined by the number of matches between strings of two or more amino acid residues or nucleosides. Identity measures the percent of identical matches between the smaller of two or more sequences with gap alignments (if any) addressed by a particular mathematical model or computer program (i.e., “algorithms”). Identity of related peptides can be readily calculated by known methods. Such methods include, but are not limited to, those described in Computational Molecular Biology, Lesk, A. M., ed., Oxford University Press, New York, 1988; Biocomputing: Informatics and Genome Projects, Smith, D. W., ed., Academic Press, New York, 1993; Computer Analysis of Sequence Data, Part 1, Griffin, A. M., and Griffin, H. G., eds., Humana Press, New Jersey, 1994; Sequence Analysis in Molecular Biology, von Heinje, G., Academic Press, 1987; Sequence Analysis Primer, Gribskov, M. and Devereux, J., eds., M. Stockton Press, New York, 1991; and Carillo et al., SIAM J. Applied Math. 48, 1073 (1988).

[0208] In some embodiments, the encoded polypeptide variant may have the same or a similar activity as the reference polypeptide. Alternatively, the variant may have an altered activity (e.g., increased or decreased) relative to a reference polypeptide. Generally, variants of a particular polynucleotide or polypeptide of the invention will have at least about 40%, 45%, 50%, 55%, 60%, 65%, 70%, 75%, 80%, 85%, 90%, 91%, 92%, 93%, 94%, 95%, 96%, 97%, 98%, 99° A but less than 100% sequence identity to that particular reference polynucleotide or polypeptide as determined by sequence alignment programs and parameters described herein and known to those skilled in the art. Such tools for alignment include those of the BLAST suite (Stephen F. Altschul, Thomas L. Madden, Alejandro A. Schäffer, Jinghui Zhang, Zheng Zhang, Webb Miller, and David J. Lipman (1997), “Gapped BLAST and PSI-BLAST: a new generation of protein database search programs”, Nucleic Acids Res. 25:3389-3402.) Other tools are described herein, specifically in the definition of “Identity.”

[0209] Default parameters in the BLAST algorithm include, for example, an expect threshold of 10, Word size of 28, Match/Mismatch Scores 1, -2, Gap costs Linear. Any filter can be applied as well as a selection for species specific repeats, e.g., Homo sapiens.

Polynucleotides having Untranslated Regions (UTRs)

[0210] The polynucleotides of the present invention may comprise one or more regions or parts which act or function as an untranslated region. Where polynucleotides are designed to encode at least one polypeptide of interest, the polynucleotides may comprise one or more of these untranslated regions.

[0211] By definition, wild type untranslated regions (UTRs) of a gene are transcribed but not translated. In mRNA, the 5′UTR starts at the transcription start site and continues to the start codon but does not include the start codon; whereas, the 3′UTR starts immediately following the stop codon and continues until the transcriptional termination signal. There is growing body of evidence about the regulatory roles played by the UTRs in terms of stability of the nucleic acid molecule and translation. The regulatory features of a UTR can be incorporated into the polynucleotides of the present invention to, among other things, enhance the stability of the molecule. The specific features can also be incorporated to ensure controlled down-regulation of the transcript in case they are misdirected to undesired organs sites.

[0212] Tables 1 and 2 provide a listing of exemplary UTRs which may be utilized in the polynucleotides of the present invention. Shown in Table 1 is a listing of a 5′-untranslated region of the invention. Variants of 5′ UTRs may be utilized wherein one or more nucleotides are added or removed to the termini, including A, T, C or G.

TABLE 1
5′-Untranslated Regions

| 5′ UTR | Name/ | | SEQ ID |
|---|---|---|---|
| Identifier | Description | Sequence | NO. |
| 5UTR-001 | Upstream UTR | GGGAAATAAGAGAGAAAAGAAGAGTAAGAAG | 3 |
| | | AAATATAAGAGCCACC | |
| 5UTR-002 | Upstream UTR | GGGAGATCAGAGAGAAAAGAAGAGTAAGAAG | 4 |
| | | AAATATAAGAGCCACC | |
| 5UTR-003 | Upstream UTR | GGAATAAAAGTCTCAACACAACATATACAAAA | 5 |
| | | CAAACGAATCTCAAGCAATCAAGCATTCTACT | |
| | | TCTATTGCAGCAATTTAAATCATTTCTTTTAAA | |
| | | GCAAAAGCAATTTTCTGAAAATTTTCACCATTT | |
| | | ACGAACGATAGCAAC | |
| 5UTR-004 | Upstream UTR | GGGAGACAAGCUUGGCAUUCCGGUACUGUUG | 6 |
| | | GUAAAGCCACC | |
| 5UTR-005 | Upstream UTR | GGGAGATCAGAGAGAAAAGAAGAGTAAGAAG | 7 |
| | | AAATATAAGAGCCACC | |
| 5UTR-006 | Upstream UTR | GGAATAAAAGTCTCAACACAACATATACAAAA | 8 |
| | | CAAACGAATCTCAAGCAATCAAGCATTCTACT | |
| | | TCTATTGCAGCAATTTAAATCATTTCTTTTAAA | |
| | | GCAAAAGCAATTTTCTGAAAATTTTCACCATTT | |
| | | ACGAACGATAGCAAC | |
| 5UTR-007 | Upstream UTR | GGGAGACAAGCUUGGCAUUCCGGUACUGUUG | 9 |
| | | GUAAAGCCACC | |
| 5UTR-008 | Upstream UTR | GGGAATTAACAGAGAAAAGAAGAGTAAGAAG | 10 |
| | | AAATATAAGAGCCACC | |
| 5UTR-009 | Upstream UTR | GGGAAATTAGACAGAAAAGAAGAGTAAGAAG | 11 |
| | | AAATATAAGAGCCACC | |
| 5UTR-010 | Upstream UTR | GGGAAATAAGAGAGTAAAGAACAGTAAGAAG | 12 |
| | | AAATATAAGAGCCACC | |
| 5UTR-011 | Upstream UTR | GGGAAAAAAGAGAGAAAAGAAGACTAAGAAG | 13 |
| | | AAATATAAGAGCCACC | |
| 5UTR-012 | Upstream UTR | GGGAAATAAGAGAGAAAAGAAGAGTAAGAAG | 14 |
| | | ATATATAAGAGCCACC | |
| 5UTR-013 | Upstream UTR | GGGAAATAAGAGACAAAACAAGAGTAAGAAG | 15 |
| | | AAATATAAGAGCCACC | |
| 5UTR-014 | Upstream UTR | GGGAAATTAGAGAGTAAAGAACAGTAAGTAG | 16 |
| | | AATTAAAAGAGCCACC | |
| 5UTR-015 | Upstream UTR | GGGAAATAAGAGAGAATAGAAGAGTAAGAAG | 17 |
| | | AAATATAAGAGCCACC | |
| 5UTR-016 | Upstream UTR | GGGAAATAAGAGAGAAAAGAAGAGTAAGAAG | 18 |
| | | AAAATTAAGAGCCACC | |
| 5UTR-017 | Upstream UTR | GGGAAATAAGAGAGAAAAGAAGAGTAAGAAG | 19 |
| | | AAATTTAAGAGCCACC | |

[0213] Shown in Table 2 is a listing of 3′-untranslated regions of the invention. Variants of 3′ UTRs may be utilized wherein one or more nucleotides are added or removed to the termini, including A, T, C or G.

TABLE 2
3′-Untranslated Regions

| | | | SEQ |
|---|---|---|---|
| 3′ UTR | Name/ | | ID |
| Identifier | Description | Sequence | NO. |
| 3UTR-001 | Creatine | GCGCCTGCCCACCTGCCACCGACTGCTGGAACCCAGC | 20 |
| | Kinase | CAGTGGGAGGGCCTGGCCCACCAGAGTCCTGCTCCCT | |
| | | CACTCCTCGCCCCGCCCCCTGTCCCAGAGTCCCACCTG | |
| | | GGGGCTCTCTCCACCCTTCTCAGAGTTCCAGTTTCAAC | |
| | | CAGAGTTCCAACCAATGGGCTCCATCCTCTGGATTCTG | |
| | | GCCAATGAAATATCTCCCTGGCAGGGTCCTCTTCTTTT | |
| | | CCCAGAGCTCCACCCCAACCAGGAGCTCTAGTTAATG | |
| | | GAGAGCTCCCAGCACACTCGGAGCTTGTGCTTTGTCTC | |
| | | CACGCAAAGCGATAAATAAAAGCATTGGTGGCCTTTG | |
| | | GTCTTTGAATAAAGCCTGAGTAGGAAGTCTAGA | |
| 3UTR-002 | Myoglobin | GCCCCTGCCGCTCCCACCCCCACCCATCTGGGCCCCGG | 21 |
| | | GTTCAAGAGAGAGCGGGGTCTGATCTCGTGTAGCCAT | |
| | | ATAGAGTTTGCTTCTGAGTGTCTGCTTTGTTTAGTAGA | |
| | | GGTGGGCAGGAGGAGCTGAGGGGCTGGGGCTGGGGT | |
| | | GTTGAAGTTGGCTTTGCATGCCCAGCGATGCGCCTCCC | |
| | | TGTGGGATGTCATCACCCTGGGAACCGGGAGTGGCCC | |
| | | TTGGCTCACTGTGTTCTGCATGGTTTGGATCTGAATTA | |
| | | ATTGTCCTTTCTTCTAAATCCCAACCGAACTTCTTCCA | |
| | | ACCTCCAAACTGGCTGTAACCCCAAATCCAAGCCATT | |
| | | AACTACACCTGACAGTAGCAATTGTCTGATTAATCACT | |
| | | GGCCCCTTGAAGACAGCAGAATGTCCCTTTGCAATGA | |
| | | GGAGGAGATCTGGGCTGGGCGGGCCAGCTGGGGAAG | |
| | | CATTTGACTATCTGGAACTTGTGTGTGCCTCCTCAGGT | |
| | | ATGGCAGTGACTCACCTGGTTTTAATAAAACAACCTG | |
| | | CAACATCTCATGGTCTTTGAATAAAGCCTGAGTAGGA | |
| | | AGTCTAGA | |
| 3UTR-003 | α-actin | ACACACTCCACCTCCAGCACGCGACTTCTCAGGACGA | 22 |
| | | CGAATCTTCTCAATGGGGGGGCGGCTGAGCTCCAGCC | |
| | | ACCCCGCAGTCACTTTCTTTGTAACAACTTCCGTTGCT | |
| | | GCCATCGTAAACTGACACAGTGTTTATAACGTGTACAT | |
| | | ACATTAACTTATTACCTCATTTTGTTATTTTTCGAAACA | |
| | | AAGCCCTGTGGAAGAAAATGGAAAACTTGAAGAAGC | |
| | | ATTAAAGTCATTCTGTTAAGCTGCGTAAATGGTCTTTG | |
| | | AATAAAGCCTGAGTAGGAAGTCTAGA | |
| 3UTR-004 | Albumin | CATCACATTTAAAAGCATCTCAGCCTACCATGAGAAT | 23 |
| | | AAGAGAAAGAAAATGAAGATCAAAAGCTTATTCATCT | |
| | | GTTTTTCTTTTTCGTTGGTGTAAAGCCAACACCCTGTCT | |
| | | AAAAAACATAAATTTCTTTAATCATTTTGCCTCTTTTCT | |
| | | CTGTGCTTCAATTAATAAAAAATGGAAAGAATCTAAT | |
| | | AGAGTGGTACAGCACTGTTATTTTTCAAAGATGTGTTG | |
| | | CTATCCTGAAAATTCTGTAGGTTCTGTGGAAGTTCCAG | |
| | | TGTTCTCTCTTATTCCACTTCGGTAGAGGATTTCTAGTT | |
| | | TCTTGTGGGCTAATTAAATAAATCATTAATACTCTTCT | |
| | | AATGGTCTTTGAATAAAGCCTGAGTAGGAAGTCTAGA | |
| | | GCTGCCTTCTGCGGGGCTTGCCTTCTGGCCATGCCCTT | |
| 3UTR-005 | α-globin | CTTCTCTCCCTTGCACCTGTACCTCTTGGTCTTTGAATA | 24 |
| | | AAGCCTGAGTAGGAAGGCGGCCGCTCGAGCATGCATC | |
| | | TAGA | |
| 3UTR-006 | G-CSF | GCCAAGCCCTCCCCATCCCATGTATTTATCTCTATTTA | 25 |
| | | ATATTTATGTCTATTTAAGCCTCATATTTAAAGACAGG | |
| | | GAAGAGCAGAACGGAGCCCCAGGCCTCTGTGTCCTTC | |
| | | CCTGCATTTCTGAGTTTCATTCTCCTGCCTGTAGCAGT | |
| | | GAGAAAAAGCTCCTGTCCTCCCATCCCCTGGACTGGG | |
| | | AGGTAGATAGGTAAATACCAAGTATTTATTACTATGA | |
| | | CTGCTCCCCAGCCCTGGCTCTGCAATGGGCACTGGGAT | |
| | | GAGCCGCTGTGAGCCCCTGGTCCTGAGGGTCCCCACC | |
| | | TGGGACCCTTGAGAGTATCAGGTCTCCCACGTGGGAG | |
| | | ACAAGAAATCCCTGTTTAATATTTAAACAGCAGTGTTC | |
| | | CCCATCTGGGTCCTTGCACCCCTCACTCTGGCCTCAGC | |
| | | CGACTGCACAGCGGCCCCTGCATCCCCTTGGCTGTGA | |
| | | GGCCCCTGGACAAGCAGAGGTGGCCAGAGCTGGGAG | |
| | | GCATGGCCCTGGGGTCCCACGAATTTGCTGGGGAATC | |
| | | TCGTTTTTCTTCTTAAGACTTTTGGGACATGGTTTGACT | |
| | | CCCGAACATCACCGACGCGTCTCCTGTTTTTCTGGGTG | |
| | | GCCTCGGGACACCTGCCCTGCCCCCACGAGGGTCAGG | |
| | | ACTGTGACTCTTTTTAGGGCCAGGCAGGTGCCTGGAC | |
| | | ATTTGCCTTGCTGGACGGGGACTGGGGATGTGGGAGG | |
| | | GAGCAGACAGGAGGAATCATGTCAGGCCTGTGTGTGA | |
| | | AAGGAAGCTCCACTGTCACCCTCCACCTCTTCACCCCC | |
| | | CACTCACCAGTGTCCCCTCCACTGTCACATTGTAACTG | |
| | | AACTTCAGGATAATAAAGTGTTTGCCTCCATGGTCTTT | |
| | | GAATAAAGCCTGAGTAGGAAGGCGGCCGCTCGAGCAT | |
| | | GCATCTAGA | |
| 3UTR-007 | Col1a2; | ACTCAATCTAAATTAAAAAAGAAAGAAATTTGAAAAA | 26 |
| | collagen, | ACTTTCTCTTTGCCATTTCTTCTTCTTCTTTTTTAACTGA | |
| | type I, | AAGCTGAATCCTTCCATTTCTTCTGCACATCTACTTGC | |
| | alpha 2 | TTAAATTGTGGGCAAAAGAGAAAAAGAAGGATTGATC | |
| | | AGAGCATTGTGCAATACAGTTTCATTAACTCCTTCCCC | |
| | | CGCTCCCCCAAAAATTTGAATTTTTTTTTCAACACTCTT | |
| | | ACACCTGTTATGGAAAATGTCAACCTTTGTAAGAAAA | |
| | | CCAAAATAAAAATTGAAAAATAAAAACCATAAACATT | |
| | | TGCACCACTTGTGGCTTTTGAATATCTTCCACAGAGGG | |
| | | AAGTTTAAAACCCAAACTTCCAAAGGTTTAAACTACC | |
| | | TCAAAACACTTTCCCATGAGTGTGATCCACATTGTTAG | |
| | | GTGCTGACCTAGACAGAGATGAACTGAGGTCCTTGTT | |
| | | TTGTTTTGTTCATAATACAAAGGTGCTAATTAATAGTA | |
| | | TTTCAGATACTTGAAGAATGTTGATGGTGCTAGAAGA | |
| | | ATTTGAGAAGAAATACTCCTGTATTGAGTTGTATCGTG | |
| | | TGGTGTATTTTTTAAAAAATTTGATTTAGCATTCATAT | |
| | | TTTCCATCTTATTCCCAATTAAAAGTATGCAGATTATT | |
| | | TGCCCAAATCTTCTTCAGATTCAGCATTTGTTCTTTGCC | |
| | | AGTCTCATTTTCATCTTCTTCCATGGTTCCACAGAAGC | |
| | | TTTGTTTCTTGGGCAAGCAGAAAAATTAAATTGTACCT | |
| | | ATTTTGTATATGTGAGATGTTTAAATAAATTGTGAAAA | |
| | | AAATGAAATAAAGCATGTTTGGTTTTCCAAAAGAACA | |
| | | TAT | |
| 3UTR-008 | Col6a2; | CGCCGCCGCCCGGGCCCCGCAGTCGAGGGTCGTGAGC | 27 |
| | collagen, | CCACCCCGTCCATGGTGCTAAGCGGGCCCGGGTCCCA | |
| | type VI, | CACGGCCAGCACCGCTGCTCACTCGGACGACGCCCTG | |
| | alpha 2 | GGCCTGCACCTCTCCAGCTCCTCCCACGGGGTCCCCGT | |
| | | AGCCCCGGCCCCCGCCCAGCCCCAGGTCTCCCCAGGC | |
| | | CCTCCGCAGGCTGCCCGGCCTCCCTCCCCCTGCAGCCA | |
| | | TCCCAAGGCTCCTGACCTACCTGGCCCCTGAGCTCTGG | |
| | | AGCAAGCCCTGACCCAATAAAGGCTTTGAACCCAT | |
| 3UTR-009 | RPN1; | GGGGCTAGAGCCCTCTCCGCACAGCGTGGAGACGGGG | 28 |
| | ribophorin I | CAAGGAGGGGGGTTATTAGGATTGGTGGTTTTGTTTTG | |
| | | CTTTGTTTAAAGCCGTGGGAAAATGGCACAACTTTACC | |
| | | TCTGTGGGAGATGCAACACTGAGAGCCAAGGGGTGGG | |
| | | AGTTGGGATAATTTTTATATAAAAGAAGTTTTTCCACT | |
| | | TTGAATTGCTAAAAGTGGCATTTTTCCTATGTGCAGTC | |
| | | ACTCCTCTCATTTCTAAAATAGGGACGTGGCCAGGCA | |
| | | CGGTGGCTCATGCCTGTAATCCCAGCACTTTGGGAGG | |
| | | CCGAGGCAGGCGGCTCACGAGGTCAGGAGATCGAGA | |
| | | CTATCCTGGCTAACACGGTAAAACCCTGTCTCTACTAA | |
| | | AAGTACAAAAAATTAGCTGGGCGTGGTGGTGGGCACC | |
| | | TGTAGTCCCAGCTACTCGGGAGGCTGAGGCAGGAGAA | |
| | | AGGCATGAATCCAAGAGGCAGAGCTTGCAGTGAGCTG | |
| | | AGATCACGCCATTGCACTCCAGCCTGGGCAACAGTGT | |
| | | TAAGACTCTGTCTCAAATATAAATAAATAAATAAATA | |
| | | AATAAATAAATAAATAAAAATAAAGCGAGATGTTGCC | |
| | | CTCAAA | |
| 3UTR-010 | LRP1; low | GGCCCTGCCCCGTCGGACTGCCCCCAGAAAGCCTCCT | 29 |
| | density | GCCCCCTGCCAGTGAAGTCCTTCAGTGAGCCCCTCCCC | |
| | lipoprotein | AGCCAGCCCTTCCCTGGCCCCGCCGGATGTATAAATGT | |
| | receptor- | AAAAATGAAGGAATTACATTTTATATGTGAGCGAGCA | |
| | related | AGCCGGCAAGCGAGCACAGTATTATTTCTCCATCCCCT | |
| | protein 1 | CCCTGCCTGCTCCTTGGCACCCCCATGCTGCCTTCAGG | |
| | | GAGACAGGCAGGGAGGGCTTGGGGCTGCACCTCCTAC | |
| | | CCTCCCACCAGAACGCACCCCACTGGGAGAGCTGGTG | |
| | | GTGCAGCCTTCCCCTCCCTGTATAAGACACTTTGCCAA | |
| | | GGCTCTCCCCTCTCGCCCCATCCCTGCTTGCCCGCTCC | |
| | | CACAGCTTCCTGAGGGCTAATTCTGGGAAGGGAGAGT | |
| | | TCTTTGCTGCCCCTGTCTGGAAGACGTGGCTCTGGGTG | |
| | | AGGTAGGCGGGAAAGGATGGAGTGTTTTAGTTCTTGG | |
| | | GGGAGGCCACCCCAAACCCCAGCCCCAACTCCAGGGG | |
| | | CACCTATGAGATGGCCATGCTCAACCCCCCTCCCAGA | |
| | | CAGGCCCTCCCTGTCTCCAGGGCCCCCACCGAGGTTCC | |
| | | CAGGGCTGGAGACTTCCTCTGGTAAACATTCCTCCAGC | |
| | | CTCCCCTCCCCTGGGGACGCCAAGGAGGTGGGCCACA | |
| | | CCCAGGAAGGGAAAGCGGGCAGCCCCGTTTTGGGGAC | |
| | | GTGAACGTTTTAATAATTTTTGCTGAATTCCTTTACAA | |
| | | CTAAATAACACAGATATTGTTATAAATAAAATTGT | |
| 3UTR-011 | Nnt1; | ATATTAAGGATCAAGCTGTTAGCTAATAATGCCACCTC | 30 |
| | cardio- | TGCAGTTTTGGGAACAGGCAAATAAAGTATCAGTATA | |
| | trophin-like | CATGGTGATGTACATCTGTAGCAAAGCTCTTGGAGAA | |
| | cytokine | AATGAAGACTGAAGAAAGCAAAGCAAAAACTGTATA | |
| | factor 1 | GAGAGATTTTTCAAAAGCAGTAATCCCTCAATTTTAAA | |
| | | AAAGGATTGAAAATTCTAAATGTCTTTCTGTGCATATT | |
| | | TTTTGTGTTAGGAATCAAAAGTATTTTATAAAAGGAG | |
| | | AAAGAACAGCCTCATTTTAGATGTAGTCCTGTTGGATT | |
| | | TTTTATGCCTCCTCAGTAACCAGAAATGTTTTAAAAAA | |
| | | CTAAGTGTTTAGGATTTCAAGACAACATTATACATGGC | |
| | | TCTGAAATATCTGACACAATGTAAACATTGCAGGCAC | |
| | | CTGCATTTTATGTTTTTTTTTTCAACAAATGTGACTAAT | |
| | | TTGAAACTTTTATGAACTTCTGAGCTGTCCCCTTGCAA | |
| | | TTCAACCGCAGTTTGAATTAATCATATCAAATCAGTTT | |
| | | TAATTTTTTAAATTGTACTTCAGAGTCTATATTTCAAG | |
| | | GGCACATTTTCTCACTACTATTTTAATACATTAAAGGA | |
| | | CTAAATAATCTTTCAGAGATGCTGGAAACAAATCATTT | |
| | | GCTTTATATGTTTCATTAGAATACCAATGAAACATACA | |
| | | ACTTGAAAATTAGTAATAGTATTTTTGAAGATCCCATT | |
| | | TCTAATTGGAGATCTCTTTAATTTCGATCAACTTATAA | |
| | | TGTGTAGTACTATATTAAGTGCACTTGAGTGGAATTCA | |
| | | ACATTTGACTAATAAAATGAGTTCATCATGTTGGCAA | |
| | | GTGATGTGGCAATTATCTCTGGTGACAAAAGAGTAAA | |
| | | ATCAAATATTTCTGCCTGTTACAAATATCAAGGAAGA | |
| | | CCTGCTACTATGAAATAGATGACATTAATCTGTCTTCA | |
| | | CTGTTTATAATACGGATGGATTTTTTTTCAAATCAGTG | |
| | | TGTGTTTTGAGGTCTTATGTAATTGATGACATTTGAGA | |
| | | GAAATGGTGGCTTTTTTTAGCTACCTCTTTGTTCATTTA | |
| | | AGCACCAGTAAAGATCATGTCTTTTTATAGAAGTGTA | |
| | | GATTTTCTTTGTGACTTTGCTATCGTGCCTAAAGCTCT | |
| | | AAATATAGGTGAATGTGTGATGAATACTCAGATTATTT | |
| | | GTCTCTCTATATAATTAGTTTGGTACTAAGTTTCTCAA | |
| | | AAAATTATTAACACATGAAAGACAATCTCTAAACCAG | |
| | | AAAAAGAAGTAGTACAAATTTTGTTACTGTAATGCTC | |
| | | GCGTTTAGTGAGTTTAAAACACACAGTATCTTTTGGTT | |
| | | TTATAATCAGTTTCTATTTTGCTGTGCCTGAGATTAAG | |
| | | ATCTGTGTATGTGTGTGTGTGTGTGTGTGCGTTTGTGT | |
| | | GTTAAAGCAGAAAAGACTTTTTTAAAAGTTTTAAGTG | |
| | | ATAAATGCAATTTGTTAATTGATCTTAGATCACTAGTA | |
| | | AACTCAGGGCTGAATTATACCATGTATATTCTATTAGA | |
| | | AGAAAGTAAACACCATCTTTATTCCTGCCCTTTTTCTT | |
| | | CTCTCAAAGTAGTTGTAGTTATATCTAGAAAGAAGCA | |
| | | ATTTTGATTTCTTGAAAAGGTAGTTCCTGCACTCAGTT | |
| | | TAAACTAAAAATAATCATACTTGGATTTTATTTATTTT | |
| | | TGTCATAGTAAAAATTTTAATTTATATATATTTTTATTT | |
| | | AGTATTATCTTATTCTTTGCTATTTGCCAATCCTTTGTC | |
| | | ATCAATTGTGTTAAATGAATTGAAAATTCATGCCCTGT | |
| | | TCATTTTATTTTACTTTATTGGTTAGGATATTTAAAGG | |
| | | ATTTTTGTATATATAATTTCTTAAATTAATATTCCAAA | |
| | | AGGTTAGTGGACTTAGATTATAAATTATGGCAAAAAT | |
| | | CTAAAAACAACAAAAATGATTTTTATACATTCTATTTC | |
| | | ATTATTCCTCTTTTTCCAATAAGTCATACAATTGGTAG | |
| | | ATATGACTTATTTTATTTTTGTATTATTCACTATATCTT | |
| | | TATGATATTTAAGTATAAATAATTAAAAAAATTTATTG | |
| | | TACCTTATAGTCTGTCACCAAAAAAAAAAAATTATCT | |
| | | GTAGGTAGTGAAATGCTAATGTTGATTTGTCTTTAAGG | |
| | | GCTTGTTAACTATCCTTTATTTTCTCATTTGTCTTAAAT | |
| | | TAGGAGTTTGTGTTTAAATTACTCATCTAAGCAAAAAA | |
| | | TGTATATAAATCCCATTACTGGGTATATACCCAAAGG | |
| | | ATTATAAATCATGCTGCTATAAAGACACATGCACACG | |
| | | TATGTTTATTGCAGCACTATTCACAATAGCAAAGACTT | |
| | | GGAACCAACCCAAATGTCCATCAATGATAGACTTGAT | |
| | | TAAGAAAATGTGCACATATACACCATGGAATACTATG | |
| | | CAGCCATAAAAAAGGATGAGTTCATGTCCTTTGTAGG | |
| | | GACATGGATAAAGCTGGAAACCATCATTCTGAGCAAA | |
| | | CTATTGCAAGGACAGAAAACCAAACACTGCATGTTCT | |
| | | CACTCATAGGTGGGAATTGAACAATGAGAACACTTGG | |
| | | ACACAAGGTGGGGAACACCACACACCAGGGCCTGTCA | |
| | | TGGGGTGGGGGGAGTGGGGAGGGATAGCATTAGGAG | |
| | | ATATACCTAATGTAAATGATGAGTTAATGGGTGCAGC | |
| | | ACACCAACATGGCACATGTATACATATGTAGCAAACC | |
| | | TGCACGTTGTGCACATGTACCCTAGAACTTAAAGTATA | |
| | | ATTAAAAAAAAAAAGAAAACAGAAGCTATTTATAAA | |
| | | GAAGTTATTTGCTGAAATAAATGTGATCTTTCCCATTA | |
| | | AAAAAATAAAGAAATTTTGGGGTAAAAAAACACAAT | |
| | | ATATTGTATTCTTGAAAAATTCTAAGAGAGTGGATGTG | |
| | | AAGTGTTCTCACCACAAAAGTGATAACTAATTGAGGT | |
| | | AATGCACATATTAATTAGAAAGATTTTGTCATTCCACA | |
| | | ATGTATATATACTTAAAAATATGTTATACACAATAAAT | |
| | | ACATACATTAAAAAATAAGTAAATGTA | |
| 3UTR-012 | Col6a1; | CCCACCCTGCACGCCGGCACCAAACCCTGTCCTCCCAC | 31 |
| | collagen, | CCCTCCCCACTCATCACTAAACAGAGTAAAATGTGAT | |
| | type VI, | GCGAATTTTCCCGACCAACCTGATTCGCTAGATTTTTT | |
| | alpha 1 | TTAAGGAAAAGCTTGGAAAGCCAGGACACAACGCTGC | |
| | | TGCCTGCTTTGTGCAGGGTCCTCCGGGGCTCAGCCCTG | |
| | | AGTTGGCATCACCTGCGCAGGGCCCTCTGGGGCTCAG | |
| | | CCCTGAGCTAGTGTCACCTGCACAGGGCCCTCTGAGG | |
| | | CTCAGCCCTGAGCTGGCGTCACCTGTGCAGGGCCCTCT | |
| | | GGGGCTCAGCCCTGAGCTGGCCTCACCTGGGTTCCCC | |
| | | ACCCCGGGCTCTCCTGCCCTGCCCTCCTGCCCGCCCTC | |
| | | CCTCCTGCCTGCGCAGCTCCTTCCCTAGGCACCTCTGT | |
| | | GCTGCATCCCACCAGCCTGAGCAAGACGCCCTCTCGG | |
| | | GGCCTGTGCCGCACTAGCCTCCCTCTCCTCTGTCCCCA | |
| | | TAGCTGGTTTTTCCCACCAATCCTCACCTAACAGTTAC | |
| | | TTTACAATTAAACTCAAAGCAAGCTCTTCTCCTCAGCT | |
| | | TGGGGCAGCCATTGGCCTCTGTCTCGTTTTGGGAAACC | |
| | | AAGGTCAGGAGGCCGTTGCAGACATAAATCTCGGCGA | |
| | | CTCGGCCCCGTCTCCTGAGGGTCCTGCTGGTGACCGGC | |
| | | CTGGACCTTGGCCCTACAGCCCTGGAGGCCGCTGCTG | |
| | | ACCAGCACTGACCCCGACCTCAGAGAGTACTCGCAGG | |
| | | GGCGCTGGCTGCACTCAAGACCCTCGAGATTAACGGT | |
| | | GCTAACCCCGTCTGCTCCTCCCTCCCGCAGAGACTGGG | |
| | | GCCTGGACTGGACATGAGAGCCCCTTGGTGCCACAGA | |
| | | GGGCTGTGTCTTACTAGAAACAACGCAAACCTCTCCTT | |
| | | CCTCAGAATAGTGATGTGTTCGACGTTTTATCAAAGGC | |
| | | CCCCTTTCTATGTTCATGTTAGTTTTGCTCCTTCTGTGT | |
| | | TTTTTTCTGAACCATATCCATGTTGCTGACTTTTCCAAA | |
| | | TAAAGGTTTTCACTCCTCTC | |
| 3UTR-013 | Calr; | AGAGGCCTGCCTCCAGGGCTGGACTGAGGCCTGAGCG | 32 |
| | calreticulin | CTCCTGCCGCAGAGCTGGCCGCGCCAAATAATGTCTCT | |
| | | GTGAGACTCGAGAACTTTCATTTTTTTCCAGGCTGGTT | |
| | | CGGATTTGGGGTGGATTTTGGTTTTGTTCCCCTCCTCC | |
| | | ACTCTCCCCCACCCCCTCCCCGCCCTTTTTTTTTTTTTT | |
| | | TTTTAAACTGGTATTTTATCTTTGATTCTCCTTCAGCCC | |
| | | TCACCCCTGGTTCTCATCTTTCTTGATCAACATCTTTTC | |
| | | TTGCCTCTGTCCCCTTCTCTCATCTCTTAGCTCCCCTCC | |
| | | AACCTGGGGGGCAGTGGTGTGGAGAAGCCACAGGCCT | |
| | | GAGATTTCATCTGCTCTCCTTCCTGGAGCCCAGAGGAG | |
| | | GGCAGCAGAAGGGGGTGGTGTCTCCAACCCCCCAGCA | |
| | | CTGAGGAAGAACGGGGCTCTTCTCATTTCACCCCTCCC | |
| | | TTTCTCCCCTGCCCCCAGGACTGGGCCACTTCTGGGTG | |
| | | GGGCAGTGGGTCCCAGATTGGCTCACACTGAGAATGT | |
| | | AAGAACTACAAACAAAATTTCTATTAAATTAAATTTTG | |
| | | TGTCTCC | |
| 3UTR-014 | Col1a1; | CTCCCTCCATCCCAACCTGGCTCCCTCCCACCCAACCA | 33 |
| | collagen, | ACTTTCCCCCCAACCCGGAAACAGACAAGCAACCCAA | |
| | type I, | CTGAACCCCCTCAAAAGCCAAAAAATGGGAGACAAT | |
| | alpha 1 | TTCACATGGACTTTGGAAAATATTTTTTTCCTTTGCATT | |
| | | CATCTCTCAAACTTAGTTTTTATCTTTGACCAACCGAA | |
| | | CATGACCAAAAACCAAAAGTGCATTCAACCTTACCAA | |
| | | AAAAAAAAAAAAAAAAAGAATAAATAAATAACTTTTT | |
| | | AAAAAAGGAAGCTTGGTCCACTTGCTTGAAGACCCAT | |
| | | GCGGGGGTAAGTCCCTTTCTGCCCGTTGGGCTTATGAA | |
| | | ACCCCAATGCTGCCCTTTCTGCTCCTTTCTCCACACCC | |
| | | CCCTTGGGGCCTCCCCTCCACTCCTTCCCAAATCTGTC | |
| | | TCCCCAGAAGACACAGGAAACAATGTATTGTCTGCCC | |
| | | AGCAATCAAAGGCAATGCTCAAACACCCAAGTGGCCC | |
| | | CCACCCTCAGCCCGCTCCTGCCCGCCCAGCACCCCCAG | |
| | | GCCCTGGGGGACCTGGGGTTCTCAGACTGCCAAAGAA | |
| | | GCCTTGCCATCTGGCGCTCCCATGGCTCTTGCAACATC | |
| | | TCCCCTTCGTTTTTGAGGGGGTCATGCCGGGGGAGCCA | |
| | | CCAGCCCCTCACTGGGTTCGGAGGAGAGTCAGGAAGG | |
| | | GCCACGACAAAGCAGAAACATCGGATTTGGGGAACGC | |
| | | GTGTCAATCCCTTGTGCCGCAGGGCTGGGCGGGAGAG | |
| | | ACTGTTCTGTTCCTTGTGTAACTGTGTTGCTGAAAGAC | |
| | | TACCTCGTTCTTGTCTTGATGTGTCACCGGGGCAACTG | |
| | | CCTGGGGGCGGGGATGGGGGCAGGGTGGAAGCGGCT | |
| | | CCCCATTTTATACCAAAGGTGCTACATCTATGTGATGG | |
| | | GTGGGGTGGGGAGGGAATCACTGGTGCTATAGAAATT | |
| | | GAGATGCCCCCCCAGGCCAGCAAATGTTCCTTTTTGTT | |
| | | CAAAGTCTATTTTTATTCCTTGATATTTTTCTTTTTTTTT | |
| | | TTTTTTTTTTGTGGATGGGGACTTGTGAATTTTTCTAAA | |
| | | GGTGCTATTTAACATGGGAGGAGAGCGTGTGCGGCTC | |
| | | CAGCCCAGCCCGCTGCTCACTTTCCACCCTCTCTCCAC | |
| | | CTGCCTCTGGCTTCTCAGGCCTCTGCTCTCCGACCTCT | |
| | | CTCCTCTGAAACCCTCCTCCACAGCTGCAGCCCATCCT | |
| | | CCCGGCTCCCTCCTAGTCTGTCCTGCGTCCTCTGTCCC | |
| | | CGGGTTTCAGAGACAACTTCCCAAAGCACAAAGCAGT | |
| | | TTTTCCCCCTAGGGGTGGGAGGAAGCAAAAGACTCTG | |
| | | TACCTATTTTGTATGTGTATAATAATTTGAGATGTTTTT | |
| | | AATTATTTTGATTGCTGGAATAAAGCATGTGGAAATG | |
| | | ACCCAAACATAATCCGCAGTGGCCTCCTAATTTCCTTC | |
| | | TTTGGAGTTGGGGGAGGGGTAGACATGGGGAAGGGG | |
| | | CTTTGGGGTGATGGGCTTGCCTTCCATTCCTGCCCTTT | |
| | | CCCTCCCCACTATTCTCTTCTAGATCCCTCCATAACCC | |
| | | CACTCCCCTTTCTCTCACCCTTCTTATACCGCAAACCTT | |
| | | TCTACTTCCTCTTTCATTTTCTATTCTTGCAATTTCCTT | |
| | | GCACCTTTTCCAAATCCTCTTCTCCCCTGCAATACCAT | |
| | | ACAGGCAATCCACGTGCACAACACACACACACACTCT | |
| | | TCACATCTGGGGTTGTCCAAACCTCATACCCACTCCCC | |
| | | TTCAAGCCCATCCACTCTCCACCCCCTGGATGCCCTGC | |
| | | ACTTGGTGGCGGTGGGATGCTCATGGATACTGGGAGG | |
| | | GTGAGGGGAGTGGAACCCGTGAGGAGGACCTGGGGG | |
| | | CCTCTCCTTGAACTGACATGAAGGGTCATCTGGCCTCT | |
| | | GCTCCCTTCTCACCCACGCTGACCTCCTGCCGAAGGAG | |
| | | CAACGCAACAGGAGAGGGGTCTGCTGAGCCTGGCGAG | |
| | | GGTCTGGGAGGGACCAGGAGGAAGGCGTGCTCCCTGC | |
| | | TCGCTGTCCTGGCCCTGGGGGAGTGAGGGAGACAGAC | |
| | | ACCTGGGAGAGCTGTGGGGAAGGCACTCGCACCGTGC | |
| | | TCTTGGGAAGGAAGGAGACCTGGCCCTGCTCACCACG | |
| | | GACTGGGTGCCTCGACCTCCTGAATCCCCAGAACACA | |
| | | ACCCCCCTGGGCTGGGGTGGTCTGGGGAACCATCGTG | |
| | | CCCCCGCCTCCCGCCTACTCCTTTTTAAGCTT | |
| 3UTR-015 | Plod1; | TTGGCCAGGCCTGACCCTCTTGGACCTTTCTTCTTTGC | 34 |
| | procollagen- | CGACAACCACTGCCCAGCAGCCTCTGGGACCTCGGGG | |
| | lysine, 2- | TCCCAGGGAACCCAGTCCAGCCTCCTGGCTGTTGACTT | |
| | oxoglutarate | CCCATTGCTCTTGGAGCCACCAATCAAAGAGATTCAA | |
| | 5- | AGAGATTCCTGCAGGCCAGAGGCGGAACACACCTTTA | |
| | dioxygenase | TGGCTGGGGCTCTCCGTGGTGTTCTGGACCCAGCCCCT | |
| | 1 | GGAGACACCATTCACTTTTACTGCTTTGTAGTGACTCG | |
| | | TGCTCTCCAACCTGTCTTCCTGAAAAACCAAGGCCCCC | |
| | | TTCCCCCACCTCTTCCATGGGGTGAGACTTGAGCAGAA | |
| | | CAGGGGCTTCCCCAAGTTGCCCAGAAAGACTGTCTGG | |
| | | GTGAGAAGCCATGGCCAGAGCTTCTCCCAGGCACAGG | |
| | | TGTTGCACCAGGGACTTCTGCTTCAAGTTTTGGGGTAA | |
| | | AGACACCTGGATCAGACTCCAAGGGCTGCCCTGAGTC | |
| | | TGGGACTTCTGCCTCCATGGCTGGTCATGAGAGCAAA | |
| | | CCGTAGTCCCCTGGAGACAGCGACTCCAGAGAACCTC | |
| | | TTGGGAGACAGAAGAGGCATCTGTGCACAGCTCGATC | |
| | | TTCTACTTGCCTGTGGGGAGGGGAGTGACAGGTCCAC | |
| | | ACACCACACTGGGTCACCCTGTCCTGGATGCCTCTGAA | |
| | | GAGAGGGACAGACCGTCAGAAACTGGAGAGTTTCTAT | |
| | | TAAAGGTCATTTAAACCA | |
| 3UTR-016 | Nucb1; | TCCTCCGGGACCCCAGCCCTCAGGATTCCTGATGCTCC | 35 |
| | nucleo- | AAGGCGACTGATGGGCGCTGGATGAAGTGGCACAGTC | |
| | bindin 1 | AGCTTCCCTGGGGGCTGGTGTCATGTTGGGCTCCTGGG | |
| | | GCGGGGGCACGGCCTGGCATTTCACGCATTGCTGCCA | |
| | | CCCCAGGTCCACCTGTCTCCACTTTCACAGCCTCCAAG | |
| | | TCTGTGGCTCTTCCCTTCTGTCCTCCGAGGGGCTTGCC | |
| | | TTCTCTCGTGTCCAGTGAGGTGCTCAGTGATCGGCTTA | |
| | | ACTTAGAGAAGCCCGCCCCCTCCCCTTCTCCGTCTGTC | |
| | | CCAAGAGGGTCTGCTCTGAGCCTGCGTTCCTAGGTGG | |
| | | CTCGGCCTCAGCTGCCTGGGTTGTGGCCGCCCTAGCAT | |
| | | CCTGTATGCCCACAGCTACTGGAATCCCCGCTGCTGCT | |
| | | CCGGGCCAAGCTTCTGGTTGATTAATGAGGGCATGGG | |
| | | GTGGTCCCTCAAGACCTTCCCCTACCTTTTGTGGAACC | |
| | | AGTGATGCCTCAAAGACAGTGTCCCCTCCACAGCTGG | |
| | | GTGCCAGGGGCAGGGGATCCTCAGTATAGCCGGTGAA | |
| | | CCCTGATACCAGGAGCCTGGGCCTCCCTGAACCCCTG | |
| | | GCTTCCAGCCATCTCATCGCCAGCCTCCTCCTGGACCT | |
| | | CTTGGCCCCCAGCCCCTTCCCCACACAGCCCCAGAAG | |
| | | GGTCCCAGAGCTGACCCCACTCCAGGACCTAGGCCCA | |
| | | GCCCCTCAGCCTCATCTGGAGCCCCTGAAGACCAGTC | |
| | | CCACCCACCTTTCTGGCCTCATCTGACACTGCTCCGCA | |
| | | TCCTGCTGTGTGTCCTGTTCCATGTTCCGGTTCCATCCA | |
| | | AATACACTTTCTGGAACAAA | |
| 3UTR-017 | α-globin | GTGGAGCCTCGGTGGCCATGCTTCTTGCCCCTTGGGC | 36 |
| | | CTCCCCCCAGCCCCTCCTCCCCTTCCTGCACCCGTACC | |
| | | CCCGTGGTCTTTGAATAAAGTCTGAGTGGGCGGC | |

### 5′ UTR and Translation Initiation

[0214] Natural 5′UTRs bear features which play roles in translation initiation. They harbor signatures like Kozak sequences which are commonly known to be involved in the process by which the ribosome initiates translation of many genes. Kozak sequences have the consensus CCR(A/G)CCAUGG, where R is a purine (adenine or guanine) three bases upstream of the start codon (AUG), which is followed by another ‘G’. 5′UTR also have been known to form secondary structures which are involved in elongation factor binding.

[0215] By engineering the features typically found in abundantly expressed genes of specific target organs, one can enhance the stability and protein production of the polynucleotides of the invention. For example, introduction of 5′ UTR of liver-expressed mRNA, such as albumin, serum amyloid A, Apolipoprotein AB/E, transferrin, alpha fetoprotein, erythropoietin, or Factor VIII, could be used to enhance expression of a nucleic acid molecule, such as a polynucleotides, in hepatic cell lines or liver. Likewise, use of 5′ UTR from other tissue-specific mRNA to improve expression in that tissue is possible for muscle (MyoD, Myosin, Myoglobin, Myogenin, Herculin), for endothelial cells (Tie-1, CD36), for myeloid cells (C/EBP, AML1, G-CSF, GM-CSF, CD11b, MSR, Fr-1, i-NOS), for leukocytes (CD45, CD18), for adipose tissue (CD36, GLUT4, ACRP30, adiponectin) and for lung epithelial cells (SP-A/B/C/D). Untranslated regions useful in the design and manufacture of polynucleotides include, but are not limited, to those disclosed in co-pending, International Patent Application No. PCT/US2014/021522 (Attorney Docket Number M42), the contents of which is incorporated herein by reference in its entirety.

[0216] Other non-UTR sequences may also be used as regions or subregions within the polynucleotides. For example, introns or portions of introns sequences may be incorporated into regions of the polynucleotides of the invention. Incorporation of intronic sequences may increase protein production as well as polynucleotide levels.

[0217] Combinations of features may be included in flanking regions and may be contained within other features. For example, the ORF may be flanked by a 5′ UTR which may contain a strong Kozak translational initiation signal and/or a 3′ UTR which may include an oligo(dT) sequence for templated addition of a poly-A tail. 5′UTR may comprise a first polynucleotide fragment and a second polynucleotide fragment from the same and/or different genes such as the 5′UTRs described in US Patent Application Publication No. 20100293625, herein incorporated by reference in its entirety.

[0218] Co-pending, International Patent Application No. PCT/US2014/021522 (Attorney Docket Number M42), the contents of which is incorporated herein by reference in its entirety, provides a listing of exemplary UTRs which may be utilized in the polynucleotide of the present invention as flanking regions. Variants of 5′ or 3′ UTRs may be utilized wherein one or more nucleotides are added or removed to the termini, including A, T, C or G.

[0219] It should be understood that any UTR from any gene may be incorporated into the regions of the polynucleotide. Furthermore, multiple wild-type UTRs of any known gene may be utilized. It is also within the scope of the present invention to provide artificial UTRs which are not variants of wild type regions. These UTRs or portions thereof may be placed in the same orientation as in the transcript from which they were selected or may be altered in orientation or location. Hence a 5′ or 3′ UTR may be inverted, shortened, lengthened, made with one or more other 5′ UTRs or 3′ UTRs. As used herein, the term “altered” as it relates to a UTR sequence, means that the UTR has been changed in some way in relation to a reference sequence. For example, a 3′ or 5′ UTR may be altered relative to a wild type or native UTR by the change in orientation or location as taught above or may be altered by the inclusion of additional nucleotides, deletion of nucleotides, swapping or transposition of nucleotides. Any of these changes producing an “altered” UTR (whether 3′ or 5′) comprise a variant UTR.

[0220] In one embodiment, a double, triple or quadruple UTR such as a 5′ or 3′ UTR may be used. As used herein, a “double” UTR is one in which two copies of the same UTR are encoded either in series or substantially in series. For example, a double beta-globin 3′ UTR may be used as described in US Patent publication 20100129877, the contents of which are incorporated herein by reference in its entirety.

[0221] It is also within the scope of the present invention to have patterned UTRs. As used herein “patterned UTRs” are those UTRs which reflect a repeating or alternating pattern, such as ABABAB or AABBAABBAABB or ABCABCABC or variants thereof repeated once, twice, or more than 3 times. In these patterns, each letter, A, B, or C represent a different UTR at the nucleotide level.

[0222] In one embodiment, flanking regions are selected from a family of transcripts whose proteins share a common function, structure, feature of property. For example, polypeptides of interest may belong to a family of proteins which are expressed in a particular cell, tissue or at some time during development. The UTRs from any of these genes may be swapped for any other UTR of the same or different family of proteins to create a new polynucleotide. As used herein, a “family of proteins” is used in the broadest sense to refer to a group of two or more polypeptides of interest which share at least one function, structure, feature, localization, origin, or expression pattern.

[0223] In one embodiment, flanking regions may be heterologous.

[0224] In one embodiment, the 5′ untranslated region may be derived from a different species than the 3′ untranslated region.

[0225] The untranslated region may also include translation enhancer elements (TEE). As a non-limiting example, the TEE may include those described in US Application No. 20090226470, herein incorporated by reference in its entirety, and those known in the art.

### 3′ UTR and the AU Rich Elements

[0226] Natural or wild type 3′ UTRs are known to have stretches of Adenosines and Uridines embedded in them. These AU rich signatures are particularly prevalent in genes with high rates of turnover. Based on their sequence features and functional properties, the AU rich elements (AREs) can be separated into three classes (Chen et al, 1995): Class I AREs contain several dispersed copies of an AUUUA motif within U-rich regions. C-Myc and MyoD contain class I AREs. Class II AREs possess two or more overlapping UUAUUUA(U/A)(U/A) nonamers. Molecules containing this type of AREs include GM-CSF and TNF-a. Class III ARES are less well defined. These U rich regions do not contain an AUUUA motif c-Jun and Myogenin are two well-studied examples of this class. Most proteins binding to the AREs are known to destabilize the messenger, whereas members of the ELAV family, most notably HuR, have been documented to increase the stability of mRNA. HuR binds to AREs of all the three classes. Engineering the HuR specific binding sites into the 3′ UTR of nucleic acid molecules will lead to HuR binding and thus, stabilization of the message in vivo.

[0227] Introduction, removal or modification of 3′ UTR AU rich elements (AREs) can be used to modulate the stability of polynucleotides of the invention. When engineering specific polynucleotides, one or more copies of an ARE can be introduced to make polynucleotides of the invention less stable and thereby curtail translation and decrease production of the resultant protein. Likewise, AREs can be identified and removed or mutated to increase the intracellular stability and thus increase translation and production of the resultant protein. Transfection experiments can be conducted in relevant cell lines, using polynucleotides of the invention and protein production can be assayed at various time points post-transfection. For example, cells can be transfected with different ARE-engineering molecules and by using an ELISA kit to the relevant protein and assaying protein produced at 6 hour, 12 hour, 24 hour, 48 hour, and 7 days post-transfection.

microRNA Binding Sites

[0228] microRNAs (or miRNA) are 19-25 nucleotide long noncoding RNAs that bind to the 3′UTR of nucleic acid molecules and down-regulate gene expression either by reducing nucleic acid molecule stability or by inhibiting translation. The polynucleotides of the invention may comprise one or more microRNA target sequences, microRNA sequences, or microRNA seeds. Such sequences may correspond to any known microRNA such as those taught in US Publication US2005/0261218, US Publication US2005/0059005, U.S. patent application Ser. No. 14/041,011 (Attorney Docket No. M037.10), U.S. patent application Ser. No. 14/043,927 (Attorney Docket No. M039.11), International Patent Application No. PCT/US13/62531 (Attorney Docket No. M037.20), and International Patent Application No. PCT/US 13/62943 (Attorney Docket No. M039.21), the contents of each of which are incorporated herein by reference in their entirety.

[0229] A microRNA sequence comprises a “seed” region, i.e., a sequence in the region of positions 2-8 of the mature microRNA, which sequence has perfect Watson-Crick complementarity to the miRNA target sequence. A microRNA seed may comprise positions 2-8 or 2-7 of the mature microRNA. In some embodiments, a microRNA seed may comprise 7 nucleotides (e.g., nucleotides 2-8 of the mature microRNA), wherein the seed-complementary site in the corresponding miRNA target is flanked by an adenine (A) opposed to microRNA position 1. In some embodiments, a microRNA seed may comprise 6 nucleotides (e.g., nucleotides 2-7 of the mature microRNA), wherein the seed-complementary site in the corresponding miRNA target is flanked byan adenine (A) opposed to microRNA position 1. See for example, Grimson A, Farh K K, Johnston W K, Garrett-Engele P, Lim L P, Bartel D P; Mol Cell. 2007 Jul. 6; 27(1):91-105; each of which is herein incorporated by reference in their entirety. The bases of the microRNA seed have complete complementarity with the target sequence. By engineering microRNA target sequences into the polynucleotides (e.g., in a 3′UTR like region or other region) of the invention one can target the molecule for degradation or reduced translation, provided the microRNA in question is available. This process will reduce the hazard of off target effects upon nucleic acid molecule delivery. Identification of microRNA, microRNA target regions, and their expression patterns and role in biology have been reported (Bonauer et al., Curr Drug Targets 2010 11:943-949; Anand and Cheresh Curr Opin Hematol 2011 18:171-176; Contreras and Rao Leukemia 2012 26:404-413 (2011 Dec. 20. doi: 10.1038/leu.2011.356); Bartel Cell 2009 136:215-233; Landgraf et al, Cell, 2007 129:1401-1414; each of which is herein incorporated by reference in its entirety).

[0230] For example, if the nucleic acid molecule is an mRNA and is not intended to be delivered to the liver but ends up there, then miR-122, a microRNA abundant in liver, can inhibit the expression of the gene of interest if one or multiple target sites of miR-122 are engineered into the 3′ UTR region of the polynucleotides. Introduction of one or multiple binding sites for different microRNA can be engineered to further decrease the longevity, stability, and protein translation of polynucleotides.

[0231] As used herein, the term “microRNA site” refers to a microRNA target site or a microRNA recognition site, or any nucleotide sequence to which a microRNA binds or associates. It should be understood that “binding” may follow traditional Watson-Crick hybridization rules or may reflect any stable association of the microRNA with the target sequence at or adjacent to the microRNA site.

[0232] Conversely, for the purposes of the polynucleotides of the present invention, microRNA binding sites can be engineered out of (i.e. removed from) sequences in which they occur, e.g., in order to increase protein expression in specific tissues. For example, miR-122 binding sites may be removed to improve protein expression in the liver. Regulation of expression in multiple tissues can be accomplished through introduction or removal or one or several microRNA binding sites.

[0233] Examples of tissues where microRNA are known to regulate mRNA, and thereby protein expression, include, but are not limited to, liver (miR-122), muscle (miR-133, miR-206, miR-208), endothelial cells (miR-17-92, miR-126), myeloid cells (miR-142-3p, miR-142-5p, miR-16, miR-21, miR-223, miR-24, miR-27), adipose tissue (let-7, miR-30c), heart (miR-1d, miR-149), kidney (miR-192, miR-194, miR-204), and lung epithelial cells (let-7, miR-133, miR-126). MicroRNA can also regulate complex biological processes such as angiogenesis (miR-132) (Anand and Cheresh Curr Opin Hematol 2011 18:171-176; herein incorporated by reference in its entirety).

[0234] Expression profiles, microRNA and cell lines useful in the present invention include those taught in for example, in International Patent Publication Nos. WO2014113089 (Attorney Docket Number M37) and WO2014081507 (Attorney Docket Number M39), the contents of each of which are incorporated by reference in their entirety.

[0235] In the polynucleotides of the present invention, binding sites for microRNAs that are involved in such processes may be removed or introduced, in order to tailor the expression of the polynucleotides expression to biologically relevant cell types or to the context of relevant biological processes. A listing of microRNA, miR sequences and miR binding sites is listed in Table 9 of U.S. Provisional Application No. 61/753,661 filed Jan. 17, 2013, in Table 9 of U.S. Provisional Application No. 61/754,159 filed Jan. 18, 2013, and in Table 7 of U.S. Provisional Application No. 61/758,921 filed Jan. 31, 2013, each of which are herein incorporated by reference in their entireties.

[0236] Examples of use of microRNA to drive tissue or disease-specific gene expression are listed (Getner and Naldini, Tissue Antigens. 2012, 80:393-403; herein incorporated by reference in its entirety). In addition, microRNA seed sites can be incorporated into mRNA to decrease expression in certain cells which results in a biological improvement. An example of this is incorporation of miR-142 sites into a UGT1A1-expressing lentiviral vector. The presence of miR-142 seed sites reduced expression in hematopoietic cells, and as a consequence reduced expression in antigen-presenting cells, leading to the absence of an immune response against the virally expressed UGT1A1 (Schmitt et al., Gastroenterology 2010; 139:999-1007; Gonzalez-Asequinolaza et al. Gastroenterology 2010, 139:726-729; both herein incorporated by reference in its entirety). Incorporation of miR-142 sites into polynucleotides such as modified mRNA could not only reduce expression of the encoded protein in hematopoietic cells, but could also reduce or abolish immune responses to the mRNA-encoded protein. Incorporation of miR-142 seed sites (one or multiple) into mRNA would be important in the case of treatment of patients with complete protein deficiencies (UGT1A1 type I, LDLR-deficient patients, CRIM-negative Pompe patients, etc.).

[0237] Lastly, through an understanding of the expression patterns of microRNA in different cell types, polynucleotides can be engineered for more targeted expression in specific cell types or only under specific biological conditions. Through introduction of tissue-specific microRNA binding sites, polynucleotides could be designed that would be optimal for protein expression in a tissue or in the context of a biological condition.

[0238] Transfection experiments can be conducted in relevant cell lines, using engineered polynucleotides and protein production can be assayed at various time points post-transfection. For example, cells can be transfected with different microRNA binding site-engineering polynucleotides and by using an ELISA kit to the relevant protein and assaying protein produced at 6 hour, 12 hour, 24 hour, 48 hour, 72 hour and 7 days post-transfection. In vivo experiments can also be conducted using microRNA-binding site-engineered molecules to examine changes in tissue-specific expression of formulated polynucleotides.

[0239] In one embodiment, a polynucleotide encoding a tolerogenic polypeptide of interest may comprise at least one terminal modification such as, but not limited to, the terminal modifications described in U.S. patent application Ser. No. 14/043,927 (Attorney Docket No. M039.11) and International Patent Application No. PCT/US13/62943 (Attorney Docket No. M039.21), the contents of each of which are incorporated herein by reference in their entirety. As a non-limiting example, the terminal modification may be at least one miR-122 sequence or fragment such as at least one miR-122 binding site in the 3′UTR of the polynucleotide. The polynucleotide may be formulated in any of the formulations described herein such as, but not limited to, a lipid nanoparticle to target translation of the polynucleotide in myeloid cells. The size of a lipid nanoparticle comprising the polynucleotide may be optimized to specifically target APCs or DCs and/or the nanoparticles may comprise at least one targeting epitope to target APCs or DCs.

Regions having a 5′ Cap

[0240] The 5′ cap structure of a natural mRNA is involved in nuclear export, increasing mRNA stability and binds the mRNA Cap Binding Protein (CBP), which is responsible for mRNA stability in the cell and translation competency through the association of CBP with poly(A) binding protein to form the mature cyclic mRNA species. The cap further assists the removal of 5′ proximal introns removal during mRNA splicing.

[0241] Endogenous mRNA molecules may be 5′-end capped generating a 5′-ppp-5′-triphosphate linkage between a terminal guanosine cap residue and the 5′-terminal transcribed sense nucleotide of the mRNA molecule. This 5′-guanylate cap may then be methylated to generate an N7-methyl-guanylate residue. The ribose sugars of the terminal and/or anteterminal transcribed nucleotides of the 5′ end of the mRNA may optionally also be 2′-O-methylated. 5′-decapping through hydrolysis and cleavage of the guanylate cap structure may target a nucleic acid molecule, such as an mRNA molecule, for degradation.

[0242] In some embodiments, polynucleotides may be designed to incorporate a cap moiety. Modifications to the polynucleotides of the present invention may generate a non-hydrolyzable cap structure preventing decapping and thus increasing mRNA half-life. Because cap structure hydrolysis requires cleavage of 5′-ppp-5′ phosphorodiester linkages, modified nucleotides may be used during the capping reaction. For example, a Vaccinia Capping Enzyme from New England Biolabs (Ipswich, Mass.) may be used with a-thio-guanosine nucleotides according to the manufacturer's instructions to create a phosphorothioate linkage in the 5′-ppp-5′ cap. Additional modified guanosine nucleotides may be used such as a-methyl-phosphonate and seleno-phosphate nucleotides.

[0243] Additional modifications include, but are not limited to, 2′-O-methylation of the ribose sugars of 5′-terminal and/or 5′-anteterminal nucleotides of the polynucleotide (as mentioned above) on the 2′-hydroxyl group of the sugar ring. Multiple distinct 5′-cap structures can be used to generate the 5′-cap of a nucleic acid molecule, such as a polynucleotide which functions as an mRNA molecule.

[0244] Cap analogs, which herein are also referred to as synthetic cap analogs, chemical caps, chemical cap analogs, or structural or functional cap analogs, differ from natural (i.e. endogenous, wild-type or physiological) 5′-caps in their chemical structure, while retaining cap function. Cap analogs may be chemically (i.e. non-enzymatically) or enzymatically synthesized and/or linked to the polynucleotides of the invention.

[0245] For example, the Anti-Reverse Cap Analog (ARCA) cap contains two guanines linked by a 5′-5′-triphosphate group, wherein one guanine contains an N7 methyl group as well as a 3′-O-methyl group (i.e., N7,3′-O-dimethyl-guanosine-5′-triphosphate-5′-guanosine (m⁷G-3′mppp-G; which may equivalently be designated 3′ 0-Me-m7G(5)ppp(5′)G). The 3′-O atom of the other, unmodified, guanine becomes linked to the 5′-terminal nucleotide of the capped polynucleotide. The N7- and 3′-O-methlyated guanine provides the terminal moiety of the capped polynucleotide.

[0246] Another exemplary cap is mCAP, which is similar to ARCA but has a 2′-O-methyl group on guanosine (i.e., N7,2′-O-dimethyl-guanosine-5′-triphosphate-5′-guanosine, m⁷Gm-ppp-G).

[0247] In one embodiment, the cap is a dinucleotide cap analog. As a non-limiting example, the dinucleotide cap analog may be modified at different phosphate positions with a boranophosphate group or a phophoroselenoate group such as the dinucleotide cap analogs described in U.S. Pat. No. 8,519,110, the contents of which are herein incorporated by reference in its entirety.

[0248] In another embodiment, the cap is a cap analog is a N7-(4-chlorophenoxyethyl) substituted dicucleotide form of a cap analog known in the art and/or described herein. Non-limiting examples of a N7-(4-chlorophenoxyethyl) substituted dicucleotide form of a cap analog include a N7-(4-chlorophenoxyethyl)-G(5′)ppp(5′)G and a N7-(4-chlorophenoxyethyl)-m^{3′-O}G(5′)ppp(5′)G cap analog (See e.g., the various cap analogs and the methods of synthesizing cap analogs described in Kore et al. Bioorganic & Medicinal Chemistry 2013 21:4570-4574; the contents of which are herein incorporated by reference in its entirety). In another embodiment, a cap analog of the present invention is a 4-chloro/bromophenoxyethyl analog.

[0249] While cap analogs allow for the concomitant capping of a polynucleotide or a region thereof, in an in vitro transcription reaction, up to 20% of transcripts can remain uncapped. This, as well as the structural differences of a cap analog from an endogenous 5′-cap structures of nucleic acids produced by the endogenous, cellular transcription machinery, may lead to reduced translational competency and reduced cellular stability.

[0250] Polynucleotides of the invention may also be capped post-manufacture (whether IVT or chemical synthesis), using enzymes, in order to generate more authentic 5′-cap structures. As used herein, the phrase “more authentic” refers to a feature that closely mirrors or mimics, either structurally or functionally, an endogenous or wild type feature. That is, a “more authentic” feature is better representative of an endogenous, wild-type, natural or physiological cellular function and/or structure as compared to synthetic features or analogs, etc., of the prior art, or which outperforms the corresponding endogenous, wild-type, natural or physiological feature in one or more respects. Non-limiting examples of more authentic 5′cap structures of the present invention are those which, among other things, have enhanced binding of cap binding proteins, increased half life, reduced susceptibility to 5′ endonucleases and/or reduced 5′decapping, as compared to synthetic 5′cap structures known in the art (or to a wild-type, natural or physiological 5′cap structure). For example, recombinant Vaccinia Virus Capping Enzyme and recombinant 2′-O-methyltransferase enzyme can create a canonical 5′-5′-triphosphate linkage between the 5′-terminal nucleotide of a polynucleotide and a guanine cap nucleotide wherein the cap guanine contains an N7 methylation and the 5′-terminal nucleotide of the mRNA contains a 2′-O-methyl. Such a structure is termed the Cap1 structure. This cap results in a higher translational-competency and cellular stability and a reduced activation of cellular pro-inflammatory cytokines, as compared, e.g., to other 5′cap analog structures known in the art. Cap structures include, but are not limited to, 7mG(5′)ppp(5′)N,pN2p (cap 0), 7mG(5′)ppp(5′)NlmpNp (cap 1), and 7mG(5′)-ppp(5′)NlmpN2mp (cap 2).

[0251] As a non-limiting example, capping chimeric polynucleotides post-manufacture may be more efficient as nearly 100% of the chimeric polynucleotides may be capped. This is in contrast to ˜80% when a cap analog is linked to a chimeric polynucleotide in the course of an in vitro transcription reaction.

[0252] According to the present invention, 5′ terminal caps may include endogenous caps or cap analogs. According to the present invention, a 5′ terminal cap may comprise a guanine analog. Useful guanine analogs include, but are not limited to, inosine, N1-methyl-guanosine, 2′fluoro-guanosine, 7-deaza-guanosine, 8-oxo-guanosine, 2-amino-guanosine, LNA-guanosine, and 2-azido-guanosine.

### Viral Sequences

[0253] Additional viral sequences such as, but not limited to, the translation enhancer sequence of the barley yellow dwarf virus (BYDV-PAV), the Jaagsiekte sheep retrovirus (JSRV) and/or the Enzootic nasal tumor virus (See e.g., International Pub. No. WO2012129648; herein incorporated by reference in its entirety) can be engineered and inserted in the polynucleotides of the invention and can stimulate the translation of the construct in vitro and in vivo. Transfection experiments can be conducted in relevant cell lines at and protein production can be assayed by ELISA at 12 hr, 24 hr, 48 hr, 72 hr and day 7 post-transfection.

### IRES Sequences

[0254] Further, provided are polynucleotides which may contain an internal ribosome entry site (IRES). First identified as a feature Picorna virus RNA, IRES plays an important role in initiating protein synthesis in absence of the 5′ cap structure. An IRES may act as the sole ribosome binding site, or may serve as one of multiple ribosome binding sites of an mRNA. Polynucleotides containing more than one functional ribosome binding site may encode several peptides or polypeptides that are translated independently by the ribosomes (“multicistronic nucleic acid molecules”). When polynucleotides are provided with an IRES, further optionally provided is a second translatable region. Examples of IRES sequences that can be used according to the invention include without limitation, those from picornaviruses (e.g. FMDV), pest viruses (CFFV), polio viruses (PV), encephalomyocarditis viruses (ECMV), foot-and-mouth disease viruses (FMDV), hepatitis C viruses (HCV), classical swine fever viruses (CSFV), murine leukemia virus (MLV), simian immune deficiency viruses (SIV) or cricket paralysis viruses (CrPV).

### Poly-A Tails

[0255] During RNA processing, a long chain of adenine nucleotides (poly-A tail) may be added to a polynucleotide such as an mRNA molecule in order to increase stability. Immediately after transcription, the 3′ end of the transcript may be cleaved to free a 3′ hydroxyl. Then poly-A polymerase adds a chain of adenine nucleotides to the RNA. The process, called polyadenylation, adds a poly-A tail that can be between, for example, approximately 80 to approximately 250 residues long, including approximately 80, 90, 100, 110, 120, 130, 140, 150, 160, 170, 180, 190, 200, 210, 220, 230, 240 or 250 residues long.

[0256] PolyA tails may also be added after the construct is exported from the nucleus.

[0257] According to the present invention, terminal groups on the poly A tail may be incorporated for stabilization. Polynucleotides of the present invention may include des-3′ hydroxyl tails. They may also include structural moieties or 2′-Omethyl modifications as taught by Junjie Li, et al. (Current Biology, Vol. 15, 1501-1507, Aug. 23, 2005, the contents of which are incorporated herein by reference in its entirety).

[0258] The polynucleotides of the present invention may be designed to encode transcripts with alternative polyA tail structures including histone mRNA. According to Norbury, “Terminal uridylation has also been detected on human replication-dependent histone mRNAs. The turnover of these mRNAs is thought to be important for the prevention of potentially toxic histone accumulation following the completion or inhibition of chromosomal DNA replication. These mRNAs are distinguished by their lack of a 3′ poly(A) tail, the function of which is instead assumed by a stable stem-loop structure and its cognate stem-loop binding protein (SLBP); the latter carries out the same functions as those of PABP on polyadenylated mRNAs” (Norbury, “Cytoplasmic RNA: a case of the tail wagging the dog,” Nature Reviews Molecular Cell Biology; AOP, published online 29 Aug. 2013; doi:10.1038/nrm3645) the contents of which are incorporated herein by reference in its entirety.

[0259] Unique poly-A tail lengths provide certain advantages to the polynucleotides of the present invention.

[0260] Generally, the length of a poly-A tail, when present, is greater than 30 nucleotides in length. In another embodiment, the poly-A tail is greater than 35 nucleotides in length (e.g., at least or greater than about 35, 40, 45, 50, 55, 60, 70, 80, 90, 100, 120, 140, 160, 180, 200, 250, 300, 350, 400, 450, 500, 600, 700, 800, 900, 1,000, 1,100, 1,200, 1,300, 1,400, 1,500, 1,600, 1,700, 1,800, 1,900, 2,000, 2,500, and 3,000 nucleotides). In some embodiments, the polynucleotide or region thereof includes from about 30 to about 3,000 nucleotides (e.g., from 30 to 50, from 30 to 100, from 30 to 250, from 30 to 500, from 30 to 750, from 30 to 1,000, from 30 to 1,500, from 30 to 2,000, from 30 to 2,500, from 50 to 100, from 50 to 250, from 50 to 500, from 50 to 750, from 50 to 1,000, from 50 to 1,500, from 50 to 2,000, from 50 to 2,500, from 50 to 3,000, from 100 to 500, from 100 to 750, from 100 to 1,000, from 100 to 1,500, from 100 to 2,000, from 100 to 2,500, from 100 to 3,000, from 500 to 750, from 500 to 1,000, from 500 to 1,500, from 500 to 2,000, from 500 to 2,500, from 500 to 3,000, from 1,000 to 1,500, from 1,000 to 2,000, from 1,000 to 2,500, from 1,000 to 3,000, from 1,500 to 2,000, from 1,500 to 2,500, from 1,500 to 3,000, from 2,000 to 3,000, from 2,000 to 2,500, and from 2,500 to 3,000).

[0261] In one embodiment, the poly-A tail is designed relative to the length of the overall polynucleotide or the length of a particular region of the polynucleotide. This design may be based on the length of a coding region, the length of a particular feature or region or based on the length of the ultimate product expressed from the polynucleotides.

[0262] In this context the poly-A tail may be 10, 20, 30, 40, 50, 60, 70, 80, 90, or 100% greater in length than the polynucleotide or feature thereof. The poly-A tail may also be designed as a fraction of the polynucleotides to which it belongs. In this context, the poly-A tail may be 10, 20, 30, 40, 50, 60, 70, 80, or 90% or more of the total length of the construct, a construct region or the total length of the construct minus the poly-A tail. Further, engineered binding sites and conjugation of polynucleotides for Poly-A binding protein may enhance expression.

[0263] Additionally, multiple distinct polynucleotides may be linked together via the PABP (Poly-A binding protein) through the 3′-end using modified nucleotides at the 3′-terminus of the poly-A tail. Transfection experiments can be conducted in relevant cell lines at and protein production can be assayed by ELISA at 12 hr, 24 hr, 48 hr, 72 hr and day 7 post-transfection.

[0264] In one embodiment, the polynucleotides of the present invention are designed to include a polyA-G Quartet region. The G-quartet is a cyclic hydrogen bonded array of four guanine nucleotides that can be formed by G-rich sequences in both DNA and RNA. In this embodiment, the G-quartet is incorporated at the end of the poly-A tail. The resultant polynucleotide is assayed for stability, protein production and other parameters including half-life at various time points. It has been discovered that the polyA-G quartet results in protein production from an mRNA equivalent to at least 75% of that seen using a poly-A tail of 120 nucleotides alone.

### Start Codon Region

[0265] In some embodiments, the polynucleotides of the present invention may have regions that are analogous to or function like a start codon region.

[0266] In one embodiment, the translation of a polynucleotide may initiate on a codon which is not the start codon AUG. Translation of the polynucleotide may initiate on an alternative start codon such as, but not limited to, ACG, AGG, AAG, CTG/CUG, GTG/GUG, ATA/AUA, ATT/AUU, TTG/UUG (see Touriol et al. Biology of the Cell 95 (2003) 169-178 and Matsuda and Mauro PLoS ONE, 2010 5:11; the contents of each of which are herein incorporated by reference in its entirety). As a non-limiting example, the translation of a polynucleotide begins on the alternative start codon ACG. As another non-limiting example, polynucleotide translation begins on the alternative start codon CTG or CUG. As yet another non-limiting example, the translation of a polynucleotide begins on the alternative start codon GTG or GUG.

[0267] Nucleotides flanking a codon that initiates translation such as, but not limited to, a start codon or an alternative start codon, are known to affect the translation efficiency, the length and/or the structure of the polynucleotide. (See e.g., Matsuda and Mauro PLoS ONE, 2010 5:11; the contents of which are herein incorporated by reference in its entirety). Masking any of the nucleotides flanking a codon that initiates translation may be used to alter the position of translation initiation, translation efficiency, length and/or structure of a polynucleotide.

[0268] In one embodiment, a masking agent may be used near the start codon or alternative start codon in order to mask or hide the codon to reduce the probability of translation initiation at the masked start codon or alternative start codon. Non-limiting examples of masking agents include antisense locked nucleic acids (LNA) polynucleotides and exon-junction complexes (EJCs) (See e.g., Matsuda and Mauro describing masking agents LNA polynucleotides and EJCs (PLoS ONE, 2010 5:11); the contents of which are herein incorporated by reference in its entirety).

[0269] In another embodiment, a masking agent may be used to mask a start codon of a polynucleotide in order to increase the likelihood that translation will initiate on an alternative start codon.

[0270] In one embodiment, a masking agent may be used to mask a first start codon or alternative start codon in order to increase the chance that translation will initiate on a start codon or alternative start codon downstream to the masked start codon or alternative start codon.

[0271] In one embodiment, a start codon or alternative start codon may be located within a perfect complement for a miR binding site. The perfect complement of a miR binding site may help control the translation, length and/or structure of the polynucleotide similar to a masking agent. As a non-limiting example, the start codon or alternative start codon may be located in the middle of a perfect complement for a miR-122 binding site. The start codon or alternative start codon may be located after the first nucleotide, second nucleotide, third nucleotide, fourth nucleotide, fifth nucleotide, sixth nucleotide, seventh nucleotide, eighth nucleotide, ninth nucleotide, tenth nucleotide, eleventh nucleotide, twelfth nucleotide, thirteenth nucleotide, fourteenth nucleotide, fifteenth nucleotide, sixteenth nucleotide, seventeenth nucleotide, eighteenth nucleotide, nineteenth nucleotide, twentieth nucleotide or twenty-first nucleotide.

[0272] In another embodiment, the start codon of a polynucleotide may be removed from the polynucleotide sequence in order to have the translation of the polynucleotide begin on a codon which is not the start codon. Translation of the polynucleotide may begin on the codon following the removed start codon or on a downstream start codon or an alternative start codon. In a non-limiting example, the start codon ATG or AUG is removed as the first 3 nucleotides of the polynucleotide sequence in order to have translation initiate on a downstream start codon or alternative start codon. The polynucleotide sequence where the start codon was removed may further comprise at least one masking agent for the downstream start codon and/or alternative start codons in order to control or attempt to control the initiation of translation, the length of the polynucleotide and/or the structure of the polynucleotide.

### Stop Codon Region

[0273] In one embodiment, the polynucleotides of the present invention may include at least two stop codons before the 3′ untranslated region (UTR). The stop codon may be selected from TGA, TAA and TAG. In one embodiment, the polynucleotides of the present invention include the stop codon TGA and one additional stop codon. In a further embodiment the addition stop codon may be TAA. In another embodiment, the polynucleotides of the present invention include three stop codons.

### Signal Sequences

[0274] The polynucleotides may also encode additional features which facilitate trafficking of the polypeptides to therapeutically relevant sites. One such feature which aids in protein trafficking is the signal sequence. As used herein, a “signal sequence” or “signal peptide” is a polynucleotide or polypeptide, respectively, which is from about 9 to 200 nucleotides (3-60 amino acids) in length which is incorporated at the 5′ (or N-terminus) of the coding region or polypeptide encoded, respectively. Addition of these sequences result in trafficking of the encoded polypeptide to the endoplasmic reticulum through one or more secretory pathways. Some signal peptides are cleaved from the protein by signal peptidase after the proteins are transported.

[0275] Additional signal sequences which may be utilized in the present invention include those taught in, for example, databases such as those found at http://www.signalpeptide.de/ or http://proline.bic.nus.edu.sg/spdb/. Those described in U.S. Pat. Nos. 8,124,379; 7,413,875 and 7,385,034 are also within the scope of the invention and the contents of each are incorporated herein by reference in their entirety.

### Tolerogenic Molecules Encoded by Polynucleotides

[0276] According to the present invention, the polynucleotides may encode at least one polypeptide of interest. Certain tolerogenic molecules of the present invention are listed in Table 3. Shown in Table 3, in addition to the name and description of the gene encoding the polypeptide of interest, where applicable, (Tolerogenic Molecule Description) are the ENSEMBL Transcript ID (ENST), the ENSEMBL Protein ID (ENSP) and the optimized open reading frame sequence ID (Optimized ORF SEQ ID).

[0277] For any particular gene there may exist one or more variants or isoforms. Non-limiting examples of these variants or isoforms, if known, are shown in the table as well. It will be appreciated by those of skill in the art that disclosed in the Table are potential flanking regions. These are encoded in each ENST transcript either to the 5′ (upstream) or 3′ (downstream) of the ORF or coding region. The coding region is definitively and specifically disclosed by teaching the ENSP and/or the Protein sequence. Consequently, the sequences taught flanking that encode the protein are considered regions that flank the ORF or coding region. It is also possible to further characterize the 5′ and 3′ regions that flank the ORF or coding region by utilizing one or more available databases or algorithms. Databases have annotated the features contained in the regions that flank the ORF or coding region of the ENST transcripts and these are available in the art. Also described in Table 3, if known are optimized transcript and/or ORF sequences. In Table 3, “N/A” means not applicable.

TABLE 3
Tolerogenic Molecules

| | | | | | | Optimized | |
|---|---|---|---|---|---|---|---|
| | | | Protein | | Trans | Trans | Optimized |
| | | | SEQ ID | | SEQ ID | SEQ ID | ORF SEQ |
| No. | Tolerogenic Molecule Description | ENSP | NO | ENST | NO | NO | ID NO |
| 1 | CD274 molecule | 370985 | 37 | 381573 | 172 | | 220, 259, 298, |
| | | | | | | | 337, 376 |
| 2 | CD274 molecule | 370989 | 38 | 381577 | 173 | | 221, 260, 299, |
| | | | | | | | 338, 377 |
| 3 | CD40 molecule, TNF receptor | 361350 | 39 | 372276 | 174 | | 222, 261, 300, |
| | superfamily member 5 | | | | | | 339, 378 |
| 4 | CD40 molecule, TNF receptor | 361352 | 40 | 372278 | 175 | | 223, 262, 301, |
| | superfamily member 5 | | | | | | 340, 379 |
| 5 | CD40 molecule, TNF receptor | 361359 | 41 | 372285 | 176 | | 224, 263, 302, |
| | superfamily member 5 | | | | | | 341, 380 |
| 6 | CD40 ligand | 359662 | 42 | 370628 | 177 | | 225, 264, 303, |
| | | | | | | | 342, 381 |
| 7 | CD40 ligand | 359663 | 43 | 370629 | 178 | | 226, 265, 304, |
| | | | | | | | 343, 382 |
| 8 | Anti-CD40L domain antibody (dAb) | N/A | 44 | | | | |
| 9 | Mutated IgG-4 chain C region | N/A | 45 | | | | |
| 10 | Membrane bound IgM CH4 of IgM | N/A | 46 | | | | |
| 11 | Membrane bound IgG-4 chain with a | N/A | 47 | | | | |
| | VK signal peptide, a FLAG tag, an | | | | | | |
| | anti-CD40L dAb and an immunoglobin | | | | | | |
| | mu chain | | | | | | |
| 12 | Secreted IgG-4 chain with a VK signal | N/A | 48 | | | | |
| | peptide, a FLAG tag and an anti-CD40L dAb | | | | | | |
| 13 | lymphocyte antigen 75 | 263636 | 49 | 263636 | 179 | | 227, 266, 305, |
| | | | | | | | 344, 383 |
| 14 | lymphocyte antigen 75 | 451446 | 50 | 553424 | 180 | | 228, 267, 306, |
| | | | | | | | 345, 384 |
| 15 | lymphocyte antigen 75 | 451511 | 51 | 554112 | 181 | | 229, 268, 307, |
| | | | | | | | 346, 385 |
| 16 | CD52 molecule | 363330 | 52 | 374213 | 182 | | 230, 269, 308, |
| | | | | | | | 347, 386 |
| 17 | fms-related tyrosine kinase 3 ligand | 204637 | 53 | 204637 | 183 | | 231, 270, 309, |
| | | | | | | | 348, 387, 415, |
| | | | | | | | 420 |
| 18 | fms-related tyrosine kinase 3 ligand | 341305 | 54 | 344019 | 184 | | 232, 271, 310, |
| | | | | | | | 349, 388, 416, |
| | | | | | | | 421 |
| 19 | fms-related tyrosine kinase 3 ligand | 469613 | 55 | 594009 | 185 | | 233, 272, 311, |
| | | | | | | | 350, 389 |
| 20 | lectin, galactoside-binding, soluble, 1 | 215909 | 56 | 215909 | 186 | | 234, 273, 312, |
| | | | | | | | 351, 390 |
| 21 | leucine rich repeat containing 32 | 260061 | 57 | 260061 | 187 | | 235, 274, 313, |
| | | | | | | | 352, 391 |
| 22 | leucine rich repeat containing 32 | 385766 | 58 | 404995 | 188 | | 236, 275, 314, |
| | | | | | | | 353, 392 |
| 23 | leucine rich repeat containing 32 | 384126 | 59 | 407242 | 189 | | 237, 276, 315, |
| | | | | | | | 354, 393 |
| 24 | leucine rich repeat containing 32 | 413331 | 60 | 421973 | 190 | | 238, 277, 316, |
| | | | | | | | 355, 394 |
| 25 | indoleamine 2,3-dioxygenase 1 | 430950 | 61 | 518237 | 191 | | 239, 278, 317, |
| | | | | | | | 356, 395 |
| 26 | indoleamine 2,3-dioxygenase 1 | 429297 | 62 | 518804 | 192 | | 240, 279, 318, |
| | | | | | | | 357, 396 |
| 27 | indoleamine 2,3-dioxygenase 1 | 428716 | 63 | 519154 | 193 | | 241, 280, 319, |
| | | | | | | | 358, 397 |
| 28 | indoleamine 2,3-dioxygenase 1 | 430505 | 64 | 522495 | 194 | | 242, 281, 320, |
| | | | | | | | 359, 398 |
| 29 | indoleamine 2,3-dioxygenase 1 | 429933 | 65 | 522840 | 195 | | 243, 282, 321, |
| | | | | | | | 360, 399 |
| 30 | indoleamine 2,3-dioxygenase 2 | 426447 | 66 | 389060 | 196 | | 244, 283, 322, |
| | | | | | | | 361, 400 |
| 31 | indoleamine 2,3-dioxygenase 2 | 443432 | 67 | 502986 | 197 | | 245, 284, 323, |
| | | | | | | | 362, 401 |
| 32 | interleukin 10 | 412237 | 68 | 423557 | 198 | | 213, 246, 285, |
| | | | | | | | 324, 363, 402, |
| | | | | | | | 425-511 |
| 33 | interleukin 10 | | | | | 216 | |
| 34 | interleukin 12A (natural killer cell | 303231 | 69 | 305579 | 199 | | 247, 286, 325, |
| | stimulatory factor 1, cytotoxic | | | | | | 364, 403, 417, |
| | lymphocyte maturation factor 1, p35) | | | | | | 422 |
| 35 | interleukin 12A (natural killer cell | 419046 | 70 | 466512 | 200 | | 248, 287, 326, |
| | stimulatory factor 1, cytotoxic | | | | | | 365, 404, 418, |
| | lymphocyte maturation factor 1, p35) | | | | | | 423 |
| 36 | interleukin 12A (natural killer cell | 420184 | 71 | 480787 | 201 | | 249, 288, 327, |
| | stimulatory factor 1, cytotoxic | | | | | | 366, 405, 419, |
| | lymphocyte maturation factor 1, p35) | | | | | | 424 |
| 37 | interleukin 12A | N/A | 72 | | | | |
| 38 | Epstein-Barr virus induced 3 | 221847 | 73 | 221847 | 202 | | 250, 289, 328, |
| | | | | | | | 367, 406 |
| 39 | Epstein-Barr virus induced 3 | N/A | 74 | | | | |
| 40 | IL12-alpha, 2A peptide, EBI3 construct with | N/A | 75 | | | | |
| | a sequence of 6 histidines | | | | | | |
| 41 | IL12-alpha, GS linker, EBI3 construct with | N/A | 76 | | | | |
| | a FLAG tag | | | | | | |
| 42 | EBI3, GS linker, IL12-alpha and an Fc region | N/A | 77 | | | | |
| 43 | interleukin 37 | 263326 | 78 | 263326 | 203 | | 251, 290, 329, |
| | | | | | | | 368, 407 |
| 44 | interleukin 37 | 309883 | 79 | 311328 | 204 | | 252, 291, 330, |
| | | | | | | | 369, 408 |
| 45 | interleukin 37 | 263328 | 80 | 349806 | 205 | | 253, 292, 331, |
| | | | | | | | 370, 409 |
| 46 | interleukin 37 | 263327 | 81 | 352179 | 206 | | 254, 293, 332, |
| | | | | | | | 371, 410 |
| 47 | interleukin 37 | 309208 | 82 | 353225 | 207 | | 255, 294, 333, |
| | | | | | | | 372, 411 |
| 48 | leukocyte immunoglobulin-like | 408995 | 83 | 430952 | 208 | | 256, 295, 334, |
| | receptor subfamily B | | | | | | 373, 412 |
| | (with TM and ITIM domains) member 4 | | | | | | |
| 49 | leukocyte immunoglobulin-like | N/A | 84 | N/A | 209 | | |
| | receptor subfamily B | | | | | | |
| | (with TM and ITIM domains) member 4 | | | | | | |
| 50 | Extracellular ILT3 | N/A | 85 | | | | |
| 51 | Extracellular ILT3-IgG1 | N/A | 86 | | | | |
| | Hinge - IgG1-Fc | | | | | | |
| 52 | Extracelllular ILT3-GS | N/A | 87 | | | | |
| | region-IgG4 CH2 CH3 | | | | | | |
| 53 | suppressor of cytokine signaling 1 | 329418 | 88 | 332029 | 210 | | 257, 296, 335, |
| | | | | | | | 374, 413 |
| 54 | suppressor of cytokine signaling 1 | | | N/A | 211 | | |
| 55 | suppressor of cytokine signaling 1 | | | | | | 214 |
| 56 | suppressor of cytokine signaling 1 cDNA | | | | | 217 | |
| 57 | suppressor of cytokine signaling 1 | | | | | | 215 |
| 58 | suppressor of cytokine signaling 1 | | | | | 218 | |
| | with mir-122 in 3′UTR cDNA | | | | | | |
| 59 | TCR inhibitory peptide | N/A | 89 | | | | |
| 60 | TCR inhibitory peptide | N/A | 90 | | | | |
| 61 | TCR inhibitory peptide | N/A | 91 | | | | |
| 62 | TCR inhibitory peptide | N/A | 92 | | | | |
| 63 | TCR inhibitory peptide | N/A | 93 | | | | |
| 64 | TCR inhibitory peptide | N/A | 94 | | | | |
| 65 | TCR inhibitory peptide | N/A | 95 | | | | |
| 66 | TCR inhibitory peptide | N/A | 96 | | | | |
| 67 | TCR inhibitory peptide | N/A | 97 | | | | |
| 68 | TCR inhibitory peptide | N/A | 98 | | | | |
| 69 | TCR inhibitory peptide | N/A | 99 | | | | |
| 70 | TCR inhibitory peptide | N/A | 100 | | | | |
| 71 | TCR inhibitory peptide | N/A | 101 | | | | |
| 72 | TCR inhibitory peptide | N/A | 102 | | | | |
| 73 | TCR inhibitory peptide | N/A | 103 | | | | |
| 74 | TCR inhibitory peptide | N/A | 104 | | | | |
| 75 | TCR inhibitory peptide | N/A | 105 | | | | |
| 76 | TCR inhibitory peptide | N/A | 106 | | | | |
| 77 | TCR inhibitory peptide | N/A | 107 | | | | |
| 78 | TCR inhibitory peptide | N/A | 108 | | | | |
| 79 | TCR inhibitory peptide | N/A | 109 | | | | |
| 80 | TCR inhibitory peptide | N/A | 110 | | | | |
| 81 | TCR inhibitory peptide | N/A | 111 | | | | |
| 82 | TCR inhibitory peptide | N/A | 112 | | | | |
| 83 | TCR inhibitory peptide | N/A | 113 | | | | |
| 84 | TCR inhibitory peptide | N/A | 114 | | | | |
| 85 | TCR inhibitory peptide | N/A | 115 | | | | |
| 86 | TCR inhibitory peptide | N/A | 116 | | | | |
| 87 | TCR inhibitory peptide | N/A | 117 | | | | |
| 88 | TCR inhibitory peptide | N/A | 118 | | | | |
| 89 | TCR inhibitory peptide | N/A | 119 | | | | |
| 90 | TCR inhibitory peptide | N/A | 120 | | | | |
| 91 | TCR inhibitory peptide | N/A | 121 | | | | |
| 92 | TCR inhibitory peptide | N/A | 122 | | | | |
| 93 | TCR inhibitory peptide | N/A | 123 | | | | |
| 94 | TCR inhibitory peptide | N/A | 124 | | | | |
| 95 | TCR inhibitory peptide | N/A | 125 | | | | |
| 96 | TCR inhibitory peptide | N/A | 126 | | | | |
| 97 | TCR inhibitory peptide | N/A | 127 | | | | |
| 98 | TCR inhibitory peptide | N/A | 128 | | | | |
| 99 | TCR inhibitory peptide | N/A | 129 | | | | |
| 100 | TCR inhibitory peptide | N/A | 130 | | | | |
| 101 | TCR inhibitory peptide | N/A | 131 | | | | |
| 102 | TCR inhibitory peptide | N/A | 132 | | | | |
| 103 | TCR inhibitory peptide | N/A | 133 | | | | |
| 104 | TCR inhibitory peptide | N/A | 134 | | | | |
| 105 | TCR inhibitory peptide | N/A | 135 | | | | |
| 106 | TCR inhibitory peptide | N/A | 136 | | | | |
| 107 | TCR inhibitory peptide | N/A | 137 | | | | |
| 108 | TCR inhibitory peptide | N/A | 138 | | | | |
| 109 | TCR inhibitory peptide | N/A | 139 | | | | |
| 110 | TCR inhibitory peptide | N/A | 140 | | | | |
| 111 | TCR inhibitory peptide | N/A | 141 | | | | |
| 112 | TCR inhibitory peptide | N/A | 142 | | | | |
| 113 | TCR inhibitory peptide | N/A | 143 | | | | |
| 114 | TCR inhibitory peptide | N/A | 144 | | | | |
| 115 | TCR inhibitory peptide | N/A | 145 | | | | |
| 116 | TCR inhibitory peptide | N/A | 146 | | | | |
| 117 | TCR inhibitory peptide | N/A | 147 | | | | |
| 118 | TCR inhibitory peptide | N/A | 148 | | | | |
| 119 | TCR inhibitory peptide | N/A | 149 | | | | |
| 120 | TCR inhibitory peptide | N/A | 150 | | | | |
| 121 | TCR inhibitory peptide | N/A | 151 | | | | |
| 122 | TCR inhibitory peptide | N/A | 152 | | | | |
| 123 | TCR inhibitory peptide | N/A | 153 | | | | |
| 124 | TCR inhibitory peptide | N/A | 154 | | | | |
| 125 | transforming growth factor, beta 1 | 221930 | 155 | 221930 | 212 | 219 | 258, 297, 336, |
| | | | | | | | 375, 414, |
| | | | | | | | 512-598 |

[0278] In one embodiment, polynucleotides of the present invention encode PD-L1. Wu et al. (2013, Cellular & Molecular Immunity; 10; 393-402) have suggested that IL-10 and TGF-beta are needed to maintain dendritic cells in tolerogenic state and that PD-L1 is needed for direct cell contact between the cell types and hence it plays important role in Treg expansion. The study showed that tolerogenic dendritic cells promote expansion of Tregs via PD-L1 on their surface and reciprocally Tregs facilitate Tol-DCs to maintain transplantation tolerance of pancreatic islets induced by apoptotic cells via secreting IL-10 and TGF-beta. Consequently, the polynucleotides taught herein provide alternative means of tolerizing cells and cellular systems.

[0279] In some embodiments, the tolerogenic polynucleotides or compositions thereof encoding PD-L1 and/or anti-CD40 ligand antibody may be used before, during or after allogenic bone marrow (BM) transplantation to prevent or ameliorate destruction of tissue allografts. Such treatments may improve or aid in the establishment of hematopoietic chimerism where both recipient and donor bone marrow cells coexist. In one embodiment, the PD-L1 encoding polynucleotides effect tolerization of both CD4 and CD8 T cells. In some embodiments, CD8 T-cells are tolerized and in this embodiment, tolerogenic polynucleotides may encode LAG-3, a homolog of CD4 that binds to MHC class II. Materials and methods for this embodiment can be found at, for example, Lucas et al, Blood, 2011, 117; 5532-5540, the contents of which are incorporated herein by reference in their entirety.

[0280] In some embodiments, tolerogenic polynucleotides may encode anti-CD40 ligand antibodies for the treatment of inflammation or obesity. The polynucleotides of the present invention may be evaluated for such outcomes using the methods as described in Poggi, et al, Arteriosclerosis Thromb. Vasc. Biol, 2011; 31; 2251-2260, the contents of which are incorporated herein by reference in their entirety.

[0281] In some embodiments, anti-CD205 antibodies or CD-205-IgG fusion proteins may be used as antigen carriers in order to tolerize cellular systems. Such antibodies or fusion proteins alone or in combination with an antigen may be delivered with or encoded by any of the tolerogenic polynucleotides of the present invention. Such CD205 fusion proteins and/or CD205 antibodies and/or antigens which may be encoded are taught in for example, Shrimpton, et al, Molecular Immunology, 2009; 46; 1229-1239, the contents of which are incorporated herein by reference in their entirety. Validation may be performed using the methods taught in Shrimpton.

[0282] In some embodiments, the tolerogenic polynucleotides of the present invention may encode soluble CD52. Such a polynucleotide may be used to suppress certain classes of T cells such as such as CD52hiCD4+ cells. In some embodiments, tolerogenic polynucleotides encoding soluble CD52 may be administered to a subject having or suspected of having diabetes. In some embodiments, the tolerogenic polynucleotide encoding soluble CD52 alters the T cell activation as compared to the response to the auto-antigen GAD65. The tolerogenic polynucleotides of the present invention may be evaluated for therapeutic outcomes by the methods described by, for example, Bandala-Sanchez et al, Nature Immunology, 2013, Vol. 14, Pages 741-748; Danke, et al., 2005, J. Autoimmun. Vol. 25, No. 4, Pages 303-311; and Yang et al., 2008, J. Autoimmun. Vol. 31, No. 1, Pages 30-41, the contents of each of which are incorporated herein by reference in their entirety.

[0283] The polynucleotides of the present invention may encode any of the monovalent anti-CD40L antibody polypeptides or fragments thereof disclosed in U.S. Pat. No. 7,563,443, the contents of which are incorporated herein by reference in its entirety. Such polynucleotides may be used for the treatment of immune related disorders or any disease or condition associated with CD40L function.

[0284] Polynucleotides of the present invention may also encode anti-CD40 antibodies, anti CD154 antibodies and/or Fc-silent anti-CD154 domain antibodies such as those described by Pinelli et al (Am. J. Transplantation, 2013, 1-10, DOI: 10.1111/sjt.12417), the contents of which are incorporated herein by reference in their entirety. Such polynucleotides are useful in prolonging graft survival, inhibition of alloreactive T cell expansion, attenuation of cytokine production of antigen-specific T cells and promotion of the conversion of Foxp+ induced Tregs.

[0285] Polynucleotides of the present invention may encode the human anti-CD40 monoclonal antibody, ASKP1240, as disclosed in Oura et al, Am. J. Transplantation, 2012, 12, 1740-54, the contents of which are incorporated herein by reference in its entirety. Such polynucleotides are useful in effecting long term hepatic allograft acceptance. In some embodiments, the polynucleotides of the present invention encode one or more polypeptides or fragments which act to block CD40 (e.g, by blocking binding to CD154) and function as immunosuppressants in the treatment of liver transplantation.

[0286] Polynucleotides of the present invention may be administered in combination with donor specific transfusion (DST). Such co-administration may be used in the treatment of or support of prologation of islet, cardiac, skin and/or kidney allograft survival. Such methods are described in, for example, Ferrer et al., 2012, PLoS ONE, volume 7, issue 7, e40559, the contents of which are incorporated herein by reference in their entirety.

[0287] Polynucleotides of the present invention may be administered alone or in combination with other polynucleotides or molecules to diminish the number of interferon-gamma producing alloreactive CD8+T cells and/or to reduce the intra-graft expression of inflammatory chemokines.

[0288] In one embodiment, anti-CD70 antibodies may be encoded by the polynucleotides of the present invention and administered either alone or in combination with anti-CD154. Such polynucleotides may be administered along with polynucleotides encoding anti-LFA1 antibodies such as those of Dai et al., to prolong the survival of heart allografts (Transplant Immunology, 2011, 195-202), the contents of which are incorporated herein by reference in its entirety.

[0289] In some embodiments, the tolerogenic polynucleotides may encode one or more cytokines which permit tolerance to self or non-self antigens. Such cytokines include TGF-beta (including the inactive latent form and the processed form), IL-27, IL-35 and/or IL37, IL-2, IL-10, IL-19, IL-20, IL-22, IL-24, IL-26, including any of the extended IL-10 superfamily as taught by Commins et al, 2008, J. Allergy Clin. Immunol., 121, 1108-1111, the contents of which are incorporated herein by reference in their entirety. These polynucleotides may be co-administered with either a self or non-self antigen.

[0290] In some embodiments, the tolerogenic polynucleotides may encode the Ig-Like Transcript 3 (ILT3) for use in modulating cytokine signaling, allogenic tumor transplantation, GVHD, and/or to induce effective anti-tumor responses in cellular systems. Such polynucleotides or compositions thereof may be evaluated using the methods and/or materials taught in, for example, Suciu-Foca, et al., J. Immunology, 2007, 178, 7432-7441; Vlad and Sucio-Foca, Exp. and Mol. Pathology, 2012, 93, 294-301; Torres-Aguilar, J. Immunol., 2010, 184, 1765-1775; Rutella, et al., Blood, 2006, 108, 1435-1440; Chang, et al., J. Immunol., 2010, 185, 5714-5722; Janikashvili, et al., Clin. and Dev. Immunol., 2011, Article ID 430394; Cheng, et al., J. B. C., 2011, 286, 18013-18025; Chang, et al., J. Immunol., 2012, 188, 000; Chang, et al., Nature Immunology, 2002, 3(3), 237; Steinman, et al., Annu. Rev. Immunol., 2003, 21, 685-711; Vlad, et al., Diabetes, 2008, 57, 1878; Ge, et al., Transplant Immunology, 2012, 26, 19-26, the contents of each of which are incorporated herein by reference in their entirety.

[0291] In some embodiments, the tolerogenic polynucleotides may encode the SOCS1 for use in inhibiting cytokine signaling and/or to induce effective anti-tumor responses in cellular systems. Such polynucleotides or compositions thereof may be evaluated using the methods and/or materials taught in, for example, Evel-Kabler et al., J. Clin. Invest. 2006, 116(1); Yoshimura et al., Arthritis Research & Therapy, 2005, 7(3), 100; the contents of each of which are incorporated herein by reference in their entirety.

[0292] In some embodiments, the tolerogenic polynucleotides may encode the IL-35 for use in treating arthritis, limiting chronic inflammatory disease such as asthma and inflammatory bowel disease or colitis or in particular microenvironments such as intestinal infection with Trichuris muris or tumor microenvironments. Such polynucleotides or compositions thereof may be evaluated using the methods and/or materials taught in, for example, Collison et al., Nature, 2007, 450(22), 566-571; Wirtz, et al., Gastroenterology, 2011, 141(5), 1875-1886; Kochetkova et al., J. Immunol. 2010, 184, 7144-7153; Neidbala, et al., Eur. J. Immunol., 2007, 37, 3021-3029; Collison, Nature Immunity, 2010, 11(12), 1093, the contents of each of which are incorporated herein by reference in their entirety.

[0293] In some embodiments, the tolerogenic polynucleotides may encode the IL-37 (formerly known as IL-1H4 and IL-1F7) for use in suppressing inflammatory and/or immune responses. Such polynucleotides or compositions thereof are taught in, and may be evaluated using the methods and/or materials of, for example, Bufler et al, PNAS, 2002, 99(21), 13723-13728; Nold et al., Nature Immunol. 2010, 11(11), 1014; Kumar et al., Cytokine, 2002, 18(2), 61-71; Boraschi, et al., Eur. Cytokine Netw., 2011, 22(3), 127-47; and Sharma et al., J. Immunol., 2008, 180, 5477-5482, the contents of each of which is incorporated herein by reference in their entirety.

[0294] Tolerogenic polynucleotides encoding IL-2 or compositions thereof may be administered to subjects for the amelioration and/or treatment of autoimmune anemia, diabetes, general autoimmunity, humoral immune responses, systemic autoimmunity, dermatomyositis, influenza, or inflammatory bowel disease.

[0295] Tolerogenic polynucleotides encoding IL-10 or compositions thereof may be administered to subjects for the amelioration and/or treatment of infections, intestinal homeostasis including colitis, inflammatory bowel disease, autoimmune diseases including lupus, cancers such as melanoma and infectious diseases including leishmaniasis and tuberculosis, Chron's disease, and psoriasis.

[0296] Tolerogenic polynucleotides encoding IL-27, IL-35 and/or IL37 or compositions thereof may be administered to subjects for the amelioration and/or treatment of pathogen-associated conditions or diseases.

[0297] In some embodiments, the tolerogenic polynucleotides may encode the hematopoietic growth factor, Flt3L for use in promoting immune tolerance. Such polynucleotides or compositions thereof may be evaluated using the encoded Flt3 ligand, methods and/or materials taught in, for example, Klein et al, Eur. J. Immunology, 2013, 43, 533-539, the contents of which are incorporated herein by reference in their entirety.

[0298] In some embodiments, the tolerogenic polynucleotides may encode the growth factor, TGFbeta 1. Such polynucleotides or compositions thereof may be evaluated using encoded TGFbeta1, in methods and/or materials taught in, for example, Li, et al., BMB Reports, 201245(9), 509-514, the contents of which are incorporated herein by reference in their entirety.

[0299] In some embodiments, the tolerogenic polynucleotides may encode the galectin-1 for use in suppressing autoimmune neuroinflammation. Such polynucleotides may be evaluated using the encoded galectin-1, an endogenous glycan-binding protein, the methods and/or materials taught in, for example, Ilarregui, et al, Nature Immunology, 2009, vol 10, no. 9, 981, the contents of which are incorporated herein by reference in their entirety.

[0300] In some embodiments, the tolerogenic polynucleotides may encode a soluble GARP (glycoprotein A repetitions predominant) protein for use as an immunomodulator of inflammatory diseases including transplant rejection, autoimmunity and allergy. Such polynucleotides may be evaluated by encoding the soluble GARP (sGARP) or using the methods and/or materials taught in, for example, Hahn, et al, Blood, 2013, 122(7); 1182-1191 or the methods and/or materials taught in, for example, Wang, et al., PNAS, 2009, 106(32), 13439-13444, the contents of both of which are incorporated herein by reference in their entirety.

[0301] In some embodiments, the tolerogenic polynucleotides of the present invention may encode one or more tregitopes, tregitope conjugates or tregitope cores, fragments or cores having flanks. Included in the tregitope family are any of those disclosed in, for example, U.S. Pat. No. 7,884,184, van der Marel, et al., World J. Gasteroent. 2012, 18(32) 4288-4299; Hui, et al., Mol. Therapy, 2013, 21(9), 1727-1737; Elyaman et al., Neurol. Res. International, 2011 Article ID256460; De Groot, et al., Blood 2008, 112, 3303-3311; Cousens et al., J. Diab. Research, 2013, Article ID 621693; Cousens, et al., Autoimmunity Reviews, 2012, doi: 10.1016, the contents of which are incorporated herein by reference in its entirety.

[0302] Evaluation of such encoded tregitopes may be performed using the materials and/or methods taught in, U.S. Pat. No. 7,884,184, van der Marel, et al., World J. Gasteroent. 2012, 18(32) 4288-4299; Hui, et al., Mol. Therapy, 2013, 21(9), 1727-1737; Elyaman et al., Neurol. Res. International, 2011 Article ID256460; De Groot, et al., Blood 2008, 112, 3303-3311; Cousens et al., J. Diab. Research, 2013, Article ID 621693; Cousens, et al., Autoimmunity Reviews, 2012, doi: 10.1016, the contents of which are incorporated herein by reference in its entirety.

[0303] In some embodiments, the tolerogenic polynucleotides may encode one or more proteins from a parasite such as a helminth, including but not limited to the Sj 16 protein from Schistosoma Japonicum or a total extract from Fasciola hepatica, or high molecular weight components of Ascaris suum, or soluble worm extract (SWA) or eggs (SEA) of Schistosoma mansoni. Such tolerogenic polynucleotides or compositions thereof are useful in the treatment of wounds to improve wound healing, diabetes, inflammation or protection against parasitic infections. Encoded proteins or peptides or extracts include those taught in, for example Hu et al, International J. Parasitol. 2009; 38, 191-200; Hu et al, J. Parasitol. 2012; 98(2), 274-283; Carranza et al, 2012, PLoS ONE, vol. 7, Issue 7, 1-9; Sun et al, 2012, Parasite Immunology, 34, 430-439; Zaccone et al., 2010, J. Biomed. And Biotech., ArticleID 795210, doi:10.1155/2010/79521; Silva et al., 2006, Eur. J. Immunol., 36, 3227-3237; Gravano and Vignali, 2012, Cell Mol. Life Sci, 69(12), 1997-2008; and Gause et al, 2013, Nature Reviews: Immunology, 13, 607-614, the contents of each of which is incorporated herein by reference in their entireties. Evaluation of such encoded proteins or peptides may be performed using the materials and/or methods taught in, for example, Hu et al, International J. Parasitol. 2009; 38, 191-200; Hu et al, J. Parasitol. 2012; 98(2), 274-283; Carranza et al, 2012, PLoS ONE, vol. 7, Issue 7, 1-9; Sun et al, 2012, Parasite Immunology, 34, 430-439; Zaccone et al., 2010, J. Biomed. And Biotech., ArticleID 795210, doi:10.1155/2010/79521; Silva et al., 2006, Eur. J. Immunol., 36, 3227-3237, the contents of each of which is incorporated herein by reference in their entirety.

[0304] In some embodiments, the tolerogenic polynucleotides may encode one or more peptides for use in the inhibition of Tcell receptor (TCR) signaling. Such tolerogenic polynucleotides or compositions thereof are useful in the treatment of a disease or condition where T-cells are involved and are taught in for example US Publication 2013/0039948 published Feb. 14, 2013, the contents of which are incorporated herein by reference in its entirety.

[0305] Evaluation of such encoded proteins or peptides may be performed using the materials and/or methods taught in, for example, example US Publication 2013/0039948 published Feb. 14, 2013, the contents of which are incorporated herein by reference in its entirety.

[0306] In some embodiments, the tolerogenic polynucleotides may encode the tryptophan catabolizing enzyme indoleamine 2,3,-dioxygense (IDO). Such tolerogenic polynucleotides or compositions thereof are useful in the treatment of systemic autoimmune disease. Evaluation of such encoded proteins or peptides may be performed using the materials and/or methods taught in, for example, Ravishankar et al, 2012, PNAS, Early Edition, doi/10.1073pnas1117736109, 1-6; Munn and Mellor, 2013, Cell, 34(3), 137-143; Curti, et al, 2009, Blood, 113, 2394-2401, the contents of each of which are incorporated herein by reference in their entirety.

[0307] In some embodiments, the tolerogenic polynucleotides may encode the foxp3 transcription factor. Such tolerogenic polynucleotides or compositions thereof may also comprise a cell penetrating peptide such as the N-terminal fragment of long PTEN isoform. These may be delivered to target APCs using any formulation taught herein, such as lipid nanoparticles. These may also incorporate or comprise one or more microRNA, microRNA binding site or precursor to minimize non-APC, non-DC and non lymphocytic translation. Evaluation of such encoded proteins or peptides may be performed using the materials and/or methods taught in, for example Hopkins et al, 2013, Science, Vol. 341, No. 6144, Pages 399-402.

### Protein Cleavage Signals and Sites

[0308] In one embodiment, the polypeptides of the present invention may include at least one protein cleavage signal containing at least one protein cleavage site. The protein cleavage site may be located at the N-terminus, the C-terminus, at any space between the N- and the C-termini such as, but not limited to, half-way between the N- and C-termini, between the N-terminus and the half way point, between the half way point and the C-terminus, and combinations thereof.

[0309] In one embodiment, the polynucleotides of the present invention may be engineered such that the polynucleotide contains at least one encoded protein cleavage signal. The encoded protein cleavage signal may be located in any region including but not limited to before the start codon, after the start codon, before the coding region, within the coding region such as, but not limited to, half way in the coding region, between the start codon and the half way point, between the half way point and the stop codon, after the coding region, before the stop codon, between two stop codons, after the stop codon and combinations thereof.

[0310] The encoded protein cleavage signal may include, but is not limited to, a proprotein convertase (or prohormone convertase), thrombin and/or Factor Xa protein cleavage signal.

[0311] As a non-limiting example, U.S. Pat. No. 7,374,930 and U.S. Pub. No. 20090227660, herein incorporated by reference in their entireties, use a furin cleavage site to cleave the N-terminal methionine of GLP-1 in the expression product from the Golgi apparatus of the cells. In one embodiment, the polypeptides of the present invention include at least one protein cleavage signal and/or site with the proviso that the polypeptide is not GLP-1.

### Insertions and Substitutions

[0312] In one embodiment, the 5′UTR of the polynucleotide may be replaced by the insertion of at least one region and/or string of nucleosides of the same base. The region and/or string of nucleotides may include, but is not limited to, at least 3, at least 4, at least 5, at least 6, at least 7 or at least 8 nucleotides and the nucleotides may be natural and/or unnatural. As a non-limiting example, the group of nucleotides may include 5-8 adenine, cytosine, thymine, a string of any of the other nucleotides disclosed herein and/or combinations thereof.

[0313] In one embodiment, the 5′UTR of the polynucleotide may be replaced by the insertion of at least two regions and/or strings of nucleotides of two different bases such as, but not limited to, adenine, cytosine, thymine, any of the other nucleotides disclosed herein and/or combinations thereof. For example, the 5′UTR may be replaced by inserting 5-8 adenine bases followed by the insertion of 5-8 cytosine bases. In another example, the 5′UTR may be replaced by inserting 5-8 cytosine bases followed by the insertion of 5-8 adenine bases.

[0314] In one embodiment, the polynucleotide may include at least one substitution and/or insertion downstream of the transcription start site which may be recognized by an RNA polymerase. As a non-limiting example, at least one substitution and/or insertion may occur downstream the transcription start site by substituting at least one nucleic acid in the region just downstream of the transcription start site (such as, but not limited to, +1 to +6). Changes to region of nucleotides just downstream of the transcription start site may affect initiation rates, increase apparent nucleotide triphosphate (NTP) reaction constant values, and increase the dissociation of short transcripts from the transcription complex curing initial transcription (Brieba et al, Biochemistry (2002) 41: 5144-5149; herein incorporated by reference in its entirety). The modification, substitution and/or insertion of at least one nucleoside may cause a silent mutation of the sequence or may cause a mutation in the amino acid sequence.

[0315] In one embodiment, the polynucleotide may include the substitution of at least 1, at least 2, at least 3, at least 4, at least 5, at least 6, at least 7, at least 8, at least 9, at least 10, at least 11, at least 12 or at least 13 guanine bases downstream of the transcription start site.

[0316] In one embodiment, the polynucleotide may include the substitution of at least 1, at least 2, at least 3, at least 4, at least 5 or at least 6 guanine bases in the region just downstream of the transcription start site. As a non-limiting example, if the nucleotides in the region are GGGAGA the guanine bases may be substituted by at least 1, at least 2, at least 3 or at least 4 adenine nucleotides. In another non-limiting example, if the nucleotides in the region are GGGAGA the guanine bases may be substituted by at least 1, at least 2, at least 3 or at least 4 cytosine bases. In another non-limiting example, if the nucleotides in the region are GGGAGA the guanine bases may be substituted by at least 1, at least 2, at least 3 or at least 4 thymine, and/or any of the nucleotides described herein.

[0317] In one embodiment, the polynucleotide may include at least one substitution and/or insertion upstream of the start codon. For the purpose of clarity, one of skill in the art would appreciate that the start codon is the first codon of the protein coding region whereas the transcription start site is the site where transcription begins. The polynucleotide may include, but is not limited to, at least 1, at least 2, at least 3, at least 4, at least 5, at least 6, at least 7 or at least 8 substitutions and/or insertions of nucleotide bases. The nucleotide bases may be inserted or substituted at 1, at least 1, at least 2, at least 3, at least 4 or at least 5 locations upstream of the start codon. The nucleotides inserted and/or substituted may be the same base (e.g., all A or all C or all T or all G), two different bases (e.g., A and C, A and T, or C and T), three different bases (e.g., A, C and T or A, C and T) or at least four different bases. As a non-limiting example, the guanine base upstream of the coding region in the polynucleotide may be substituted with adenine, cytosine, thymine, or any of the nucleotides described herein. In another non-limiting example the substitution of guanine bases in the polynucleotide may be designed so as to leave one guanine base in the region downstream of the transcription start site and before the start codon (see Esvelt et al. Nature (2011) 472(7344):499-503; the contents of which is herein incorporated by reference in its entirety). As a non-limiting example, at least 5 nucleotides may be inserted at 1 location downstream of the transcription start site but upstream of the start codon and the at least 5 nucleotides may be the same base type.

### Incorporating Post Transcriptional Control Modulators

[0318] In one embodiment, the polynucleotides of the present invention may include at least one post transcriptional control modulator. These post transcriptional control modulators may be, but are not limited to, small molecules, compounds and regulatory sequences. As a non-limiting example, post transcriptional control may be achieved using small molecules identified by PTC Therapeutics Inc. (South Plainfield, N.J.) using their GEMS™ (Gene Expression Modulation by Small-Molecules) screening technology.

[0319] The post transcriptional control modulator may be a gene expression modulator which is screened by the method detailed in or a gene expression modulator described in International Publication No. WO2006022712, herein incorporated by reference in its entirety. Methods identifying RNA regulatory sequences involved in translational control are described in International Publication No. WO2004067728, herein incorporated by reference in its entirety; methods identifying compounds that modulate untranslated region dependent expression of a gene are described in International Publication No. WO2004065561, herein incorporated by reference in its entirety.

[0320] In one embodiment, the polynucleotides of the present invention may include at least one post transcriptional control modulator is located in the 5′ and/or the 3′ untranslated region of the polynucleotides of the present invention.

[0321] In another embodiment, the polynucleotides of the present invention may include at least one post transcription control modulator to modulate premature translation termination. The post transcription control modulators may be compounds described in or a compound found by methods outlined in International Publication Nos. WO2004010106, WO2006044456, WO2006044682, WO2006044503 and WO2006044505, each of which is herein incorporated by reference in its entirety. As a non-limiting example, the compound may bind to a region of the 28S ribosomal RNA in order to modulate premature translation termination (See e.g., WO2004010106, herein incorporated by reference in its entirety).

[0322] In one embodiment, polynucleotides of the present invention may include at least one post transcription control modulator to alter protein expression. As a non-limiting example, the expression of VEGF may be regulated using the compounds described in or a compound found by the methods described in International Publication Nos. WO2005118857, WO2006065480, WO2006065479 and WO2006058088, each of which is herein incorporated by reference in its entirety.

[0323] The polynucleotides of the present invention may include at least one post transcription control modulator to control translation. In one embodiment, the post transcription control modulator may be a RNA regulatory sequence. As a non-limiting example, the RNA regulatory sequence may be identified by the methods described in International Publication No. WO2006071903, herein incorporated by reference in its entirety.

### II. DESIGN, SYNTHESIS AND QUANTITATION OF POLYNUCLEOTIDES

### Codon Optimization

[0324] The polynucleotides, their regions or parts or subregions may be codon optimized. Codon optimization methods are known in the art and may be useful in efforts to achieve one or more of several goals. These goals include to match codon frequencies in target and host organisms to ensure proper folding, bias GC content to increase mRNA stability or reduce secondary structures, minimize tandem repeat codons or base runs that may impair gene construction or expression, customize transcriptional and translational control regions, insert or remove protein trafficking sequences, remove/add post translation modification sites in encoded protein (e.g. glycosylation sites), add, remove or shuffle protein domains, insert or delete restriction sites, modify ribosome binding sites and mRNA degradation sites, to adjust translational rates to allow the various domains of the protein to fold properly, or to reduce or eliminate problem secondary structures within the polynucleotide. Codon optimization tools, algorithms and services are known in the art, non-limiting examples include services from GeneArt (Life Technologies), DNA2.0 (Menlo Park Calif.) and/or proprietary methods. In one embodiment, the ORF sequence is optimized using optimization algorithms. Codon options for each amino acid are given in Table 4.

TABLE 4
Codon Options

| | Single | |
|---|---|---|
| Amino Acid | Letter Code | Codon Options |
| Isoleucine | I | ATT, ATC, ATA |
| Leucine | L | CTT, CTC, CTA, CTG, TTA, TTG |
| Valine | V | GTT, GTC, GTA, GTG |
| Phenylalanine | F | TTT, TTC |
| Methionine | M | ATG |
| Cysteine | C | TGT, TGC |
| Alanine | A | GCT, GCC, GCA, GCG |
| Glycine | G | GGT, GGC, GGA, GGG |
| Proline | P | CCT, CCC, CCA, CCG |
| Threonine | T | ACT, ACC, ACA, ACG |
| Serine | S | TCT, TCC, TCA, TCG, AGT, AGC |
| Tyrosine | Y | TAT, TAC |
| Tryptophan | W | TGG |
| Glutamine | Q | CAA, CAG |
| Asparagine | N | AAT, AAC |
| Histidine | H | CAT, CAC |
| Glutamic acid | E | GAA, GAG |
| Aspartic acid | D | GAT, GAC |
| Lysine | K | AAA, AAG |
| Arginine | R | CGT, CGC, CGA, CGG, AGA, AGG |
| Selenocysteine | Sec | UGA in mRNA in presence of |
| | | Selenocysteine insertion element (SECIS) |
| Stop codons | Stop | TAA, TAG, TGA |

[0325] Features, which may be considered beneficial in some embodiments of the present invention, may be encoded by regions of the polynucleotide and such regions may be upstream (5′) or downstream (3′) to a region which encodes a polypeptide. These regions may be incorporated into the polynucleotide before and/or after codon optimization of the protein encoding region or open reading frame (ORF). It is not required that a polynucleotide contain both a 5′ and 3′ flanking region. Examples of such features include, but are not limited to, untranslated regions (UTRs), Kozak sequences, an oligo(dT) sequence, and detectable tags and may include multiple cloning sites which may have XbaI recognition.

[0326] In some embodiments, a 5′ UTR and/or a 3′ UTR region may be provided as flanking regions. Multiple 5′ or 3′ UTRs may be included in the flanking regions and may be the same or of different sequences. Any portion of the flanking regions, including none, may be codon optimized and any may independently contain one or more different structural or chemical modifications, before and/or after codon optimization.

[0327] After optimization (if desired), the polynucleotides components are reconstituted and transformed into a vector such as, but not limited to, plasmids, viruses, cosmids, and artificial chromosomes. For example, the optimized polynucleotide may be reconstituted and transformed into chemically competent E. coli, yeast, neurospora, maize, drosophila, etc. where high copy plasmid-like or chromosome structures occur by methods described herein.

[0328] Synthetic polynucleotides and their nucleic acid analogs play an important role in the research and studies of biochemical processes. Various enzyme-assisted and chemical-based methods have been developed to synthesize polynucleotides and nucleic acids.

[0329] Enzymatic methods include in vitro transcription which uses RNA polymerases to synthesize the polynucleotides of the present invention. Enzymatic methods and RNA polymerases for transcription are described in International Patent Application No. PCT/US2014/53907, the contents of which are herein incorporated by reference in its entirety, such as in paragraphs [000276]-[000297].

[0330] Solid-phase chemical synthesis may be used to manufacture the polynucleotides described herein or portions thereof. Solid-phase chemical synthesis manufacturing of the polynucleotides described herein are described in International Patent Application No. PCT/US2014/53907, the contents of which are herein incorporated by reference in its entirety, such as in paragraphs [000298]-[000307].

[0331] Liquid phase chemical synthesis may be used to manufacture the polynucleotides described herein or portions thereof. Liquid phase chemical synthesis manufacturing of the polynucleotides described herein are described in International Patent Application No. PCT/US2014/53907, the contents of which are herein incorporated by reference in its entirety, such as in paragraph [000308].

[0332] Combinations of different synthetic methods may be used to manufacture the polynucleotides described herein or portions thereof. These combinations are described in International Patent Application No. PCT/US2014/53907, the contents of which are herein incorporated by reference in its entirety, such as in paragraphs [000309]-[000312].

[0333] Small region synthesis which may be used for regions or subregions of the polynucleotides of the present invention. These synthesis methods are described in International Patent Application No. PCT/US2014/53907, the contents of which are herein incorporated by reference in its entirety, such as in paragraphs [000313]-[000314].

[0334] Ligation of polynucleotide regions or subregions may be used to prepare the polynucleotides described herein. These ligation methods are described in International Patent Application No. PCT/US2014/53907, the contents of which are herein incorporated by reference in its entirety, such as in paragraphs [000315]-[000322].

### Modified and Conjugated Polynucleotides

[0335] Non-natural modified nucleotides may be introduced to polynucleotides or nucleic acids during synthesis or post-synthesis of the chains to achieve desired functions or properties. The modifications may be on internucleotide lineage, the purine or pyrimidine bases, or sugar. The modification may be introduced at the terminal of a chain or anywhere else in the chain; with chemical synthesis or with a polymerase enzyme. For example, hexitol nucleic acids (HNAs) are nuclease resistant and provide strong hybridization to RNA. Short messenger RNAs (mRNAs) with hexitol residues in two codons have been constructed (Lavrik et al., Biochemistry, 40, 11777-11784 (2001), the contents of which are incorporated herein by reference in their entirety). The antisense effects of a chimeric HNA gapmer oligonucleotide comprising a phosphorothioate central sequence flanked by 5′ and 3′ HNA sequences have also been studied (See e.g., Kang et al., Nucleic Acids Research, vol. 32(4), 4411-4419 (2004), the contents of which are incorporated herein by reference in their entirety). The preparation and uses of modified nucleotides comprising 6-member rings in RNA interference, antisense therapy or other applications are disclosed in US Pat. Application No. 2008/0261905, US Pat. Application No. 2010/0009865, and International Application No. WO97/30064 to Herdewijn et al.; the contents of each of which are herein incorporated by reference in their entireties). Modified nucleic acids and their synthesis are disclosed in co-pending International Publication No. WO2013052523 (Attorney Docket Number M09), the contents of which are incorporated herein by reference for their entirety. The synthesis and strategy of modified polynucleotides is reviewed by Verma and Eckstein in Annual Review of Biochemistry, vol. 76, 99-134 (1998), the contents of which are incorporated herein by reference in their entirety.

[0336] Either enzymatic or chemical ligation methods can be used to conjugate polynucleotides or their regions with different functional blocks, such as fluorescent labels, liquids, nanoparticles, delivery agents, etc. The conjugates of polynucleotides and modified polynucleotides are reviewed by Goodchild in Bioconjugate Chemistry, vol. 1(3), 165-187 (1990), the contents of which are incorporated herein by reference in their entirety. U.S. Pat. No. 6,835,827 and U.S. Pat. No. 6,525,183 to Vinayak et al. (the contents of each of which are herein incorporated by reference in their entireties) teach synthesis of labeled oligonucleotides using a labeled solid support.

### Quantification

[0337] In one embodiment, the polynucleotides of the present invention may be quantified in exosomes or when derived from one or more bodily fluid. As used herein “bodily fluids” include peripheral blood, serum, plasma, ascites, urine, cerebrospinal fluid (CSF), sputum, saliva, bone marrow, synovial fluid, aqueous humor, amniotic fluid, cerumen, breast milk, broncheoalveolar lavage fluid, semen, prostatic fluid, cowper's fluid or pre-ejaculatory fluid, sweat, fecal matter, hair, tears, cyst fluid, pleural and peritoneal fluid, pericardial fluid, lymph, chyme, chyle, bile, interstitial fluid, menses, pus, sebum, vomit, vaginal secretions, mucosal secretion, stool water, pancreatic juice, lavage fluids from sinus cavities, bronchopulmonary aspirates, blastocyl cavity fluid, and umbilical cord blood. Alternatively, exosomes may be retrieved from an organ selected from the group consisting of lung, heart, pancreas, stomach, intestine, bladder, kidney, ovary, testis, skin, colon, breast, prostate, brain, esophagus, liver, and placenta.

[0338] In the exosome quantification method, a sample of not more than 2 mL is obtained from the subject and the exosomes isolated by size exclusion chromatography, density gradient centrifugation, differential centrifugation, nanomembrane ultrafiltration, immunoabsorbent capture, affinity purification, microfluidic separation, or combinations thereof. In the analysis, the level or concentration of a polynucleotide may be an expression level, presence, absence, truncation or alteration of the administered construct. It is advantageous to correlate the level with one or more clinical phenotypes or with an assay for a human disease biomarker. The assay may be performed using construct specific probes, cytometry, qRT-PCR, real-time PCR, PCR, flow cytometry, electrophoresis, mass spectrometry, or combinations thereof while the exosomes may be isolated using immunohistochemical methods such as enzyme linked immunosorbent assay (ELISA) methods. Exosomes may also be isolated by size exclusion chromatography, density gradient centrifugation, differential centrifugation, nanomembrane ultrafiltration, immunoabsorbent capture, affinity purification, microfluidic separation, or combinations thereof.

[0339] These methods afford the investigator the ability to monitor, in real time, the level of polynucleotides remaining or delivered. This is possible because the polynucleotides of the present invention differ from the endogenous forms due to the structural or chemical modifications.

[0340] In one embodiment, the polynucleotide may be quantified using methods such as, but not limited to, ultraviolet visible spectroscopy (UV/Vis). A non-limiting example of a UV/Vis spectrometer is a NANODROP® spectrometer (ThermoFisher, Waltham, Mass.). The quantified polynucleotide may be analyzed in order to determine if the polynucleotide may be of proper size, check that no degradation of the polynucleotide has occurred. Degradation of the polynucleotide may be checked by methods such as, but not limited to, agarose gel electrophoresis, HPLC based purification methods such as, but not limited to, strong anion exchange HPLC, weak anion exchange HPLC, reverse phase HPLC (RP-HPLC), and hydrophobic interaction HPLC (HIC-HPLC), liquid chromatography-mass spectrometry (LCMS), capillary electrophoresis (CE) and capillary gel electrophoresis (CGE).

### Purification

[0341] Purification of the polynucleotides described herein may include, but is not limited to, polynucleotide clean-up, quality assurance and quality control. Clean-up may be performed by methods known in the arts such as, but not limited to, AGENCOURT® beads (Beckman Coulter Genomics, Danvers, Mass.), poly-T beads, LNA™ oligo-T capture probes (EXIQON® Inc, Vedbaek, Denmark) or HPLC based purification methods such as, but not limited to, strong anion exchange HPLC, weak anion exchange HPLC, reverse phase HPLC (RP-HPLC), and hydrophobic interaction HPLC (HIC-HPLC). The term “purified” when used in relation to a polynucleotide such as a “purified polynucleotide” refers to one that is separated from at least one contaminant. As used herein, a “contaminant” is any substance which makes another unfit, impure or inferior. Thus, a purified polynucleotide (e.g., DNA and RNA) is present in a form or setting different from that in which it is found in nature, or a form or setting different from that which existed prior to subjecting it to a treatment or purification method.

[0342] A quality assurance and/or quality control check may be conducted using methods such as, but not limited to, gel electrophoresis, UV absorbance, or analytical HPLC.

[0343] In another embodiment, the polynucleotides may be sequenced by methods including, but not limited to reverse-transcriptase-PCR.

### III. MODIFICATIONS

[0344] As used herein in a polynucleotide (such as a chimeric polynucleotide, IVT polynucleotide or a circular polynucleotide), the terms “chemical modification” or, as appropriate, “chemically modified” refer to modification with respect to adenosine (A), guanosine (G), uridine (U), thymidine (T) or cytidine (C) ribo- or deoxyribnucleosides in one or more of their position, pattern, percent or population. Generally, herein, these terms are not intended to refer to the ribonucleotide modifications in naturally occurring 5′-terminal mRNA cap moieties.

[0345] In a polypeptide, the term “modification” refers to a modification as compared to the canonical set of 20 amino acids.

[0346] The modifications may be various distinct modifications. In some embodiments, the regions may contain one, two, or more (optionally different) nucleoside or nucleotide modifications. In some embodiments, a modified polynucleotide, introduced to a cell may exhibit reduced degradation in the cell, as compared to an unmodified polynucleotide.

[0347] Modifications which are useful in the present invention include, but are not limited to those in Table 5. Noted in the table are the symbol of the modification, the nucleobase type and whether the modification is naturally occurring or not.

TABLE 5
Modifications

| | | | Naturally |
|---|---|---|---|
| Name | Symbol | Base | Occurring |
| 2-methylthio-N6-(cis- | ms2i6A | A | YES |
| hydroxyisopentenyl)adenosine | | | |
| 2-methylthio-N6-methyladenosine | ms2m6A | A | YES |
| 2-methylthio-N6-threonyl | ms2t6A | A | YES |
| carbamoyladenosine | | | |
| N6-glycinylcarbamoyladenosine | g6A | A | YES |
| N6-isopentenyladenosine | i6A | A | YES |
| N6-methyladenosine | m6A | A | YES |
| N6-threonylcarbamoyladenosine | t6A | A | YES |
| 1,2′-O-dimethyladenosine | m1Am | A | YES |
| 1-methyladenosine | m1A | A | YES |
| 2′-O-methyladenosine | Am | A | YES |
| 2′-O-ribosyladenosine (phosphate) | Ar(p) | A | YES |
| 2-methyladenosine | m2A | A | YES |
| 2-methylthio-N6 isopentenyladenosine | ms2i6A | A | YES |
| 2-methylthio-N6-hydroxynorvalyl | ms2hn6A | A | YES |
| carbamoyladenosine | | | |
| 2′-O-methyladenosine | m6A | A | YES |
| 2′-O-ribosyladenosine (phosphate) | Ar(p) | A | YES |
| isopentenyladenosine | Iga | A | YES |
| N6-(cis-hydroxyisopentenyl)adenosine | io6A | A | YES |
| N6,2′-O-dimethyladenosine | m6Am | A | YES |
| N⁶,2′-O-dimethyladenosine | m⁶Am | A | YES |
| N6,N6,2′-O-trimethyladenosine | m62Am | A | YES |
| N6,N6-dimethyladenosine | m62A | A | YES |
| N6-acetyladenosine | ac6A | A | YES |
| N6-hydroxy- | hn6A | A | YES |
| norvalylcarbamoyladenosine | | | |
| N6-methyl-N6- | m6t6A | A | YES |
| threonylcarbamoyladenosine | | | |
| 2-methyladenosine | m²A | A | YES |
| 2-methylthio-N⁶-isopentenyladenosine | ms²i⁶A | A | YES |
| 7-deaza-adenosine | — | A | NO |
| N1-methyl-adenosine | — | A | NO |
| N6,N6 (dimethyl)adenine | — | A | NO |
| N6-cis-hydroxy-isopentenyl-adenosine | — | A | NO |
| α-thio-adenosine | — | A | NO |
| 2 (amino)adenine | — | A | NO |
| 2 (aminopropyl)adenine | — | A | NO |
| 2 (methylthio) N6 (isopentenyl)adenine | — | A | NO |
| 2-(alkyl)adenine | — | A | NO |
| 2-(aminoalkyl)adenine | — | A | NO |
| 2-(aminopropyl)adenine | — | A | NO |
| 2-(halo)adenine | — | A | NO |
| 2-(halo)adenine | — | A | NO |
| 2-(propyl)adenine | — | A | NO |
| 2′-Amino-2′-deoxy-ATP | — | A | NO |
| 2′-Azido-2′-deoxy-ATP | — | A | NO |
| 2′-Deoxy-2′-a-aminoadenosine TP | — | A | NO |
| 2′-Deoxy-2′-a-azidoadenosine TP | — | A | NO |
| 6 (alkyl)adenine | — | A | NO |
| 6 (methyl)adenine | — | A | NO |
| 6-(alkyl)adenine | — | A | NO |
| 6-(methyl)adenine | — | A | NO |
| 7 (deaza)adenine | — | A | NO |
| 8 (alkenyl)adenine | — | A | NO |
| 8 (alkynyl)adenine | — | A | NO |
| 8 (amino)adenine | — | A | NO |
| 8 (thioalkyl)adenine | — | A | NO |
| 8-(alkenyl)adenine | — | A | NO |
| 8-(alkyl)adenine | — | A | NO |
| 8-(alkynyl)adenine | — | A | NO |
| 8-(amino)adenine | — | A | NO |
| 8-(halo)adenine | — | A | NO |
| 8-(hydroxyl)adenine | — | A | NO |
| 8-(thioalkyl)adenine | — | A | NO |
| 8-(thiol)adenine | — | A | NO |
| 8-azido-adenosine | — | A | NO |
| aza adenine | — | A | NO |
| deaza adenine | — | A | NO |
| N6 (methyl)adenine | — | A | NO |
| N6-(isopentyl)adenine | — | A | NO |
| 7-deaza-8-aza-adenosine | — | A | NO |
| 7-methyladenine | — | A | NO |
| 1-Deazaadenosine TP | — | A | NO |
| 2′Fluoro-N6-Bz-deoxyadenosine TP | — | A | NO |
| 2′-OMe-2-Amino-ATP | — | A | NO |
| 2′O-methyl-N6-Bz-deoxyadenosine TP | — | A | NO |
| 2′-a-Ethynyladenosine TP | — | A | NO |
| 2-aminoadenine | — | A | NO |
| 2-Aminoadenosine TP | — | A | NO |
| 2-Amino-ATP | — | A | NO |
| 2′-a-Trifluoromethyladenosine TP | — | A | NO |
| 2-Azidoadenosine TP | — | A | NO |
| 2′-b-Ethynyladenosine TP | — | A | NO |
| 2-Bromoadenosine TP | — | A | NO |
| 2′-b-Trifluoromethyladenosine TP | — | A | NO |
| 2-Chloroadenosine TP | — | A | NO |
| 2′-Deoxy-2′,2′-difluoroadenosine TP | — | A | NO |
| 2′-Deoxy-2′-a-mercaptoadenosine TP | — | A | NO |
| 2′-Deoxy-2′-a-thiomethoxyadenosine TP | — | A | NO |
| 2′-Deoxy-2′-b-aminoadenosine TP | — | A | NO |
| 2′-Deoxy-2′-b-azidoadenosine TP | — | A | NO |
| 2′-Deoxy-2′-b-bromoadenosine TP | — | A | NO |
| 2′-Deoxy-2′-b-chloroadenosine TP | — | A | NO |
| 2′-Deoxy-2′-b-fluoroadenosine TP | — | A | NO |
| 2′-Deoxy-2′-b-iodoadenosine TP | — | A | NO |
| 2′-Deoxy-2′-b-mercaptoadenosine TP | — | A | NO |
| 2′-Deoxy-2′-b-thiomethoxyadenosine TP | — | A | NO |
| 2-Fluoroadenosine TP | — | A | NO |
| 2-Iodoadenosine TP | — | A | NO |
| 2-Mercaptoadenosine TP | — | A | NO |
| 2-methoxy-adenine | — | A | NO |
| 2-methylthio-adenine | — | A | NO |
| 2-Trifluoromethyladenosine TP | — | A | NO |
| 3-Deaza-3-bromoadenosine TP | — | A | NO |
| 3-Deaza-3-chloroadenosine TP | — | A | NO |
| 3-Deaza-3-fluoroadenosine TP | — | A | NO |
| 3-Deaza-3-iodoadenosine TP | — | A | NO |
| 3-Deazaadenosine TP | — | A | NO |
| 4′-Azidoadenosine TP | — | A | NO |
| 4′-Carbocyclic adenosine TP | — | A | NO |
| 4′-Ethynyladenosine TP | — | A | NO |
| 5′-Homo-adenosine TP | — | A | NO |
| 8-Aza-ATP | — | A | NO |
| 8-bromo-adenosine TP | — | A | NO |
| 8-Trifluoromethyladenosine TP | — | A | NO |
| 9-Deazaadenosine TP | — | A | NO |
| 2-aminopurine | — | A/G | NO |
| 7-deaza-2,6-diaminopurine | — | A/G | NO |
| 7-deaza-8-aza-2,6-diaminopurine | — | A/G | NO |
| 7-deaza-8-aza-2-aminopurine | — | A/G | NO |
| 2,6-diaminopurine | — | A/G | NO |
| 7-deaza-8-aza-adenine, 7-deaza-2- | — | A/G | NO |
| aminopurine | | | |
| 2-thiocytidine | s2C | C | YES |
| 3-methylcytidine | m3C | C | YES |
| 5-formylcytidine | f5C | C | YES |
| 5-hydroxymethylcytidine | hm5C | C | YES |
| 5-methylcytidine | m5C | C | YES |
| N4-acetylcytidine | ac4C | C | YES |
| 2′-O-methylcytidine | Cm | C | YES |
| 2′-O-methylcytidine | Cm | C | YES |
| 5,2′-O-dimethylcytidine | m5 Cm | C | YES |
| 5-formyl-2′-O-methylcytidine | f5Cm | C | YES |
| lysidine | k2C | C | YES |
| N4,2′-O-dimethylcytidine | m4Cm | C | YES |
| N4-acetyl-2′-O-methylcytidine | ac4Cm | C | YES |
| N4-methylcytidine | m4C | C | YES |
| N4,N4-Dimethyl-2′-OMe-Cytidine TP | — | C | YES |
| 4-methylcytidine | — | C | NO |
| 5-aza-cytidine | — | C | NO |
| Pseudo-iso-cytidine | — | C | NO |
| pyrrolo-cytidine | — | C | NO |
| α-thio-cytidine | — | C | NO |
| 2-(thio)cytosine | — | C | NO |
| 2′-Amino-2′-deoxy-CTP | — | C | NO |
| 2′-Azido-2′-deoxy-CTP | — | C | NO |
| 2′-Deoxy-2′-a-aminocytidine TP | — | C | NO |
| 2′-Deoxy-2′-a-azidocytidine TP | — | C | NO |
| 3 (deaza) 5 (aza)cytosine | — | C | NO |
| 3 (methyl)cytosine | — | C | NO |
| 3-(alkyl)cytosine | — | C | NO |
| 3-(deaza) 5 (aza)cytosine | — | C | NO |
| 3-(methyl)cytidine | — | C | NO |
| 4,2′-O-dimethylcytidine | — | C | NO |
| 5 (halo)cytosine | — | C | NO |
| 5 (methyl)cytosine | — | C | NO |
| 5 (propynyl)cytosine | — | C | NO |
| 5 (trifluoromethyl)cytosine | — | C | NO |
| 5-(alkyl)cytosine | — | C | NO |
| 5-(alkynyl)cytosine | — | C | NO |
| 5-(halo)cytosine | — | C | NO |
| 5-(propynyl)cytosine | — | C | NO |
| 5-(trifluoromethyl)cytosine | — | C | NO |
| 5-bromo-cytidine | — | C | NO |
| 5-iodo-cytidine | — | C | NO |
| 5-propynyl cytosine | — | C | NO |
| 6-(azo)cytosine | — | C | NO |
| 6-aza-cytidine | — | C | NO |
| aza cytosine | — | C | NO |
| deaza cytosine | — | C | NO |
| N4 (acetyl)cytosine | — | C | NO |
| 1-methyl-1-deaza-pseudoisocytidine | — | C | NO |
| 1-methyl-pseudoisocytidine | — | C | NO |
| 2-methoxy-5-methyl-cytidine | — | C | NO |
| 2-methoxy-cytidine | — | C | NO |
| 2-thio-5-methyl-cytidine | — | C | NO |
| 4-methoxy-1-methyl-pseudoisocytidine | — | C | NO |
| 4-methoxy-pseudoisocytidine | — | C | NO |
| 4-thio-1-methyl-1-deaza- | — | C | NO |
| pseudoisocytidine | | | |
| 4-thio-1-methyl-pseudoisocytidine | — | C | NO |
| 4-thio-pseudoisocytidine | — | C | NO |
| 5-aza-zebularine | — | C | NO |
| 5-methyl-zebularine | — | C | NO |
| pyrrolo-pseudoisocytidine | — | C | NO |
| zebularine | — | C | NO |
| (E)-5-(2-Bromo-vinyl)cytidine TP | — | C | NO |
| 2,2′-anhydro-cytidine TP hydrochloride | — | C | NO |
| 2′Fluor-N4-Bz-cytidine TP | — | C | NO |
| 2′Fluoro-N4-Acetyl-cytidine TP | — | C | NO |
| 2′-O-Methyl-N4-Acetyl-cytidine TP | — | C | NO |
| 2′O-methyl-N4-Bz-cytidine TP | — | C | NO |
| 2′-a-Ethynylcytidine TP | — | C | NO |
| 2′-a-Trifluoromethylcytidine TP | — | C | NO |
| 2′-b-Ethynylcytidine TP | — | C | NO |
| 2′-b-Trifluoromethylcytidine TP | — | C | NO |
| 2′-Deoxy-2′,2′-difluorocytidine TP | — | C | NO |
| 2′-Deoxy-2′-a-mercaptocytidine TP | — | C | NO |
| 2′-Deoxy-2′-a-thiomethoxycytidine TP | — | C | NO |
| 2′-Deoxy-2′-b-aminocytidine TP | — | C | NO |
| 2′-Deoxy-2′-b-azidocytidine TP | — | C | NO |
| 2′-Deoxy-2′-b-bromocytidine TP | — | C | NO |
| 2′-Deoxy-2′-b-chlorocytidine TP | — | C | NO |
| 2′-Deoxy-2′-b-fluorocytidine TP | — | C | NO |
| 2′-Deoxy-2′-b-iodocytidine TP | — | C | NO |
| 2′-Deoxy-2′-b-mercaptocytidine TP | — | C | NO |
| 2′-Deoxy-2′-b-thiomethoxycytidine TP | — | C | NO |
| 2′-O-Methyl-5-(1-propynyl)cytidine TP | — | C | NO |
| 3′-Ethynylcytidine TP | — | C | NO |
| 4′-Azidocytidine TP | — | C | NO |
| 4′-Carbocyclic cytidine TP | — | C | NO |
| 4′-Ethynylcytidine TP | — | C | NO |
| 5-(1-Propynyl)ara-cytidine TP | — | C | NO |
| 5-(2-Chloro-phenyl)-2-thiocytidine TP | — | C | NO |
| 5-(4-Amino-phenyl)-2-thiocytidine TP | — | C | NO |
| 5-Aminoallyl-CTP | — | C | NO |
| 5-Cyanocytidine TP | — | C | NO |
| 5-Ethynylara-cytidine TP | — | C | NO |
| 5-Ethynylcytidine TP | — | C | NO |
| 5′-Homo-cytidine TP | — | C | NO |
| 5-Methoxycytidine TP | — | C | NO |
| 5-Trifluoromethyl-Cytidine TP | — | C | NO |
| N4-Amino-cytidine TP | — | C | NO |
| N4-Benzoyl-cytidine TP | — | C | NO |
| pseudoisocytidine | — | C | NO |
| 7-methylguanosine | m7G | G | YES |
| N2,2′-O-dimethylguanosine | m2Gm | G | YES |
| N2-methylguanosine | m2G | G | YES |
| wyosine | imG | G | YES |
| 1,2′-O-dimethylguanosine | m1Gm | G | YES |
| 1-methylguanosine | m1G | G | YES |
| 2′-O-methylguanosine | Gm | G | YES |
| 2′-O-ribosylguanosine (phosphate) | Gr(p) | G | YES |
| 2′-O-methylguanosine | Gm | G | YES |
| 2′-O-ribosylguanosine (phosphate) | Gr(p) | G | YES |
| 7-aminomethyl-7-deazaguanosine | preQ1 | G | YES |
| 7-cyano-7-deazaguanosine | preQ0 | G | YES |
| archaeosine | G+ | G | YES |
| methylwyosine | mimG | G | YES |
| N2,7-dimethylguanosine | m2,7G | G | YES |
| N2,N2,2′-O-trimethylguanosine | m22Gm | G | YES |
| N2,N2,7-trimethylguanosine | m2,2,7G | G | YES |
| N2,N2-dimethylguanosine | m22G | G | YES |
| N²,7,2′-O-trimethylguanosine | m^{2,7}Gm | G | YES |
| 6-thio-guanosine | — | G | NO |
| 7-deaza-guanosine | — | G | NO |
| 8-oxo-guanosine | — | G | NO |
| N1-methyl-guanosine | — | G | NO |
| α-thio-guanosine | — | G | NO |
| 2 (propyl)guanine | — | G | NO |
| 2-(alkyl)guanine | — | G | NO |
| 2′-Amino-2′-deoxy-GTP | — | G | NO |
| 2′-Azido-2′-deoxy-GTP | — | G | NO |
| 2′-Deoxy-2′-a-aminoguanosine TP | — | G | NO |
| 2′-Deoxy-2′-a-azidoguanosine TP | — | G | NO |
| 6 (methyl)guanine | — | G | NO |
| 6-(alkyl)guanine | — | G | NO |
| 6-(methyl)guanine | — | G | NO |
| 6-methyl-guanosine | — | G | NO |
| 7 (alkyl)guanine | — | G | NO |
| 7 (deaza)guanine | — | G | NO |
| 7 (methyl)guanine | — | G | NO |
| 7-(alkyl)guanine | — | G | NO |
| 7-(deaza)guanine | — | G | NO |
| 7-(methyl)guanine | — | G | NO |
| 8 (alkyl)guanine | — | G | NO |
| 8 (alkynyl)guanine | — | G | NO |
| 8 (halo)guanine | — | G | NO |
| 8 (thioalkyl)guanine | — | G | NO |
| 8-(alkenyl)guanine | — | G | NO |
| 8-(alkyl)guanine | — | G | NO |
| 8-(alkynyl)guanine | — | G | NO |
| 8-(amino)guanine | — | G | NO |
| 8-(halo)guanine | — | G | NO |
| 8-(hydroxyl)guanine | — | G | NO |
| 8-(thioalkyl)guanine | — | G | NO |
| 8-(thiol)guanine | — | G | NO |
| aza guanine | — | G | NO |
| deaza guanine | — | G | NO |
| N (methyl)guanine | — | G | NO |
| N-(methyl)guanine | — | G | NO |
| 1-methyl-6-thio-guanosine | — | G | NO |
| 6-methoxy-guanosine | — | G | NO |
| 6-thio-7-deaza-8-aza-guanosine | — | G | NO |
| 6-thio-7-deaza-guanosine | — | G | NO |
| 6-thio-7-methyl-guanosine | — | G | NO |
| 7-deaza-8-aza-guanosine | — | G | NO |
| 7-methyl-8-oxo-guanosine | — | G | NO |
| N2,N2-dimethyl-6-thio-guanosine | — | G | NO |
| N2-methyl-6-thio-guanosine | — | G | NO |
| 1-Me-GTP | — | G | NO |
| 2′Fluoro-N2-isobutyl-guanosine TP | — | G | NO |
| 2′O-methyl-N2-isobutyl-guanosine TP | — | G | NO |
| 2′-a-Ethynylguanosine TP | — | G | NO |
| 2′-a-Trifluoromethylguanosine TP | — | G | NO |
| 2′-b-Ethynylguanosine TP | — | G | NO |
| 2′-b-Trifluoromethylguanosine TP | — | G | NO |
| 2′-Deoxy-2′,2′-difluoroguanosine TP | — | G | NO |
| 2′-Deoxy-2′-a-mercaptoguanosine TP | — | G | NO |
| 2′-Deoxy-2′-a-thiomethoxyguanosine TP | — | G | NO |
| 2′-Deoxy-2′-b-aminoguanosine TP | — | G | NO |
| 2′-Deoxy-2′-b-azidoguanosine TP | — | G | NO |
| 2′-Deoxy-2′-b-bromoguanosine TP | — | G | NO |
| 2′-Deoxy-2′-b-chloroguanosine TP | — | G | NO |
| 2′-Deoxy-2′-b-fluoroguanosine TP | — | G | NO |
| 2′-Deoxy-2′-b-iodoguanosine TP | — | G | NO |
| 2′-Deoxy-2′-b-mercaptoguanosine TP | — | G | NO |
| 2′-Deoxy-2′-b-thiomethoxyguanosine TP | — | G | NO |
| 4′-Azidoguanosine TP | — | G | NO |
| 4′-Carbocyclic guanosine TP | — | G | NO |
| 4′-Ethynylguanosine TP | — | G | NO |
| 5′-Homo-guanosine TP | — | G | NO |
| 8-bromo-guanosine TP | — | G | NO |
| 9-Deazaguanosine TP | — | G | NO |
| N2-isobutyl-guanosine TP | — | G | NO |
| 1-methylinosine | m1I | I | YES |
| inosine | I | I | YES |
| 1,2′-O-dimethylinosine | m1Im | I | YES |
| 2′-O-methylinosine | Im | I | YES |
| 7-methylinosine | | I | NO |
| 2′-O-methylinosine | Im | I | YES |
| epoxyqueuosine | oQ | Q | YES |
| galactosyl-queuosine | galQ | Q | YES |
| mannosylqueuosine | manQ | Q | YES |
| queuosine | Q | Q | YES |
| allyamino-thymidine | — | T | NO |
| aza thymidine | — | T | NO |
| deaza thymidine | — | T | NO |
| deoxy-thymidine | — | T | NO |
| 2′-O-methyluridine | — | U | YES |
| 2-thiouridine | s2U | U | YES |
| 3-methyluridine | m3U | U | YES |
| 5-carboxymethyluridine | cm5U | U | YES |
| 5-hydroxyuridine | ho5U | U | YES |
| 5-methyluridine | m5U | U | YES |
| 5-taurinomethyl-2-thiouridine | τm5s2U | U | YES |
| 5-taurinomethyluridine | τm5U | U | YES |
| dihydrouridine | D | U | YES |
| pseudouridine | Ψ | U | YES |
| (3-(3-amino-3-carboxypropyl)uridine | acp3U | U | YES |
| 1-methyl-3-(3-amino-5- | m1acp3Ψ | U | YES |
| carboxypropyl)pseudouridine | | | |
| 1-methylpseduouridine | m1Ψ | U | YES |
| 1-methyl-pseudouridine | — | U | YES |
| 2′-O-methyluridine | Um | U | YES |
| 2′-O-methylpseudouridine | Ψm | U | YES |
| 2′-O-methyluridine | Um | U | YES |
| 2-thio-2′-O-methyluridine | s2Um | U | YES |
| 3-(3-amino-3-carboxypropyl)uridine | acp3U | U | YES |
| 3,2′-O-dimethyluridine | m3Um | U | YES |
| 3-Methyl-pseudo-Uridine TP | — | U | YES |
| 4-thiouridine | s4U | U | YES |
| 5-(carboxyhydroxymethyl)uridine | chm5U | U | YES |
| 5-(carboxyhydroxymethyl)uridine | mchm5U | U | YES |
| methyl ester | | | |
| 5,2′-O-dimethyluridine | m5Um | U | YES |
| 5,6-dihydro-uridine | — | U | YES |
| 5-aminomethyl-2-thiouridine | nm5s2U | U | YES |
| 5-carbamoylmethyl-2′-O-methyluridine | ncm5Um | U | YES |
| 5-carbamoylmethyluridine | ncm5U | U | YES |
| 5-carboxyhydroxymethyluridine | — | U | YES |
| 5-carboxyhydroxymethyluridine methyl | — | U | YES |
| ester | | | |
| 5-carboxymethylaminomethyl-2′-O- | cmnm5Um | U | YES |
| methyluridine | | | |
| 5-carboxymethylaminomethyl-2- | cmnm5s2U | U | YES |
| thiouridine | | | |
| 5-carboxymethylaminomethyl-2- | — | U | YES |
| thiouridine | | | |
| 5-carboxymethylaminomethyluridine | cmnm5U | U | YES |
| 5-carboxymethylaminomethyluridine | — | U | YES |
| 5-Carbamoylmethyluridine TP | — | U | YES |
| 5-methoxycarbonylmethyl-2′-O- | mcm5Um | U | YES |
| methyluridine | | | |
| 5-methoxycarbonylmethyl-2-thiouridine | mcm5s2U | U | YES |
| 5-methoxycarbonylmethyluridine | mcm5U | U | YES |
| 5-methoxyuridine | mo5U | U | YES |
| 5-methyl-2-thiouridine | m5s2U | U | YES |
| 5-methylaminomethyl-2-selenouridine | mnm5se2U | U | YES |
| 5-methylaminomethyl-2-thiouridine | mnm5s2U | U | YES |
| 5-methylaminomethyluridine | mnm5U | U | YES |
| 5-Methyldihydrouridine | — | U | YES |
| 5-Oxyacetic acid-Uridine TP | — | U | YES |
| 5-Oxyacetic acid-methyl ester-Uridine | — | U | YES |
| TP | | | |
| N1-methyl-pseudo-uridine | — | U | YES |
| uridine 5-oxyacetic acid | cmo5U | U | YES |
| uridine 5-oxyacetic acid methyl ester | mcmo5U | U | YES |
| 3-(3-Amino-3-carboxypropyl)-Uridine | — | U | YES |
| TP | | | |
| 5-(iso-Pentenylaminomethyl)-2- | — | U | YES |
| thiouridine TP | | | |
| 5-(iso-Pentenylaminomethyl)-2′-O- | — | U | YES |
| methyluridine TP | | | |
| 5-(iso-Pentenylaminomethyl)uridine TP | — | U | YES |
| 5-propynyl uracil | — | U | NO |
| α-thio-uridine | — | U | NO |
| 1 (aminoalkylamino-carbonylethylenyl)- | — | U | NO |
| 2(thio)-pseudouracil | | | |
| 1 (aminoalkylaminocarbonylethylenyl)- | — | U | NO |
| 2,4-(dithio)pseudouracil | | | |
| 1 (aminoalkylaminocarbonylethylenyl)- | — | U | NO |
| 4 (thio)pseudouracil | | | |
| 1 (aminoalkylaminocarbonylethylenyl)- | — | U | NO |
| pseudouracil | | | |
| 1 (aminocarbonylethylenyl)-2(thio)- | — | U | NO |
| pseudouracil | | | |
| 1 (aminocarbonylethylenyl)-2,4- | — | U | NO |
| (dithio)pseudouracil | | | |
| 1 (aminocarbonylethylenyl)-4 | — | U | NO |
| (thio)pseudouracil | | | |
| 1 (aminocarbonylethylenyl)- | — | U | NO |
| pseudouracil | | | |
| 1 substituted 2(thio)-pseudouracil | — | U | NO |
| 1 substituted 2,4-(dithio)pseudouracil | — | U | NO |
| 1 substituted 4 (thio)pseudouracil | — | U | NO |
| 1 substituted pseudouracil | — | U | NO |
| 1-(aminoalkylamino-carbonylethylenyl)- | — | U | NO |
| 2-(thio)-pseudouracil | | | |
| 1-Methyl-3-(3-amino-3-carboxypropyl) | — | U | NO |
| pseudouridine TP | | | |
| 1-Methyl-3-(3-amino-3- | — | U | NO |
| carboxypropyl)pseudo-UTP | | | |
| 1-Methyl-pseudo-UTP | — | U | NO |
| 2 (thio)pseudouracil | — | U | NO |
| 2′ deoxy uridine | — | U | NO |
| 2′ fluorouridine | — | U | NO |
| 2-(thio)uracil | — | U | NO |
| 2,4-(dithio)psuedouracil | — | U | NO |
| 2′ methyl, 2′amino, 2′azido, 2′fluro- | — | U | NO |
| guanosine | | | |
| 2′-Amino-2′-deoxy-UTP | — | U | NO |
| 2′-Azido-2′-deoxy-UTP | — | U | NO |
| 2′-Azido-deoxyuridine TP | — | U | NO |
| 2′-O-methylpseudouridine | — | U | NO |
| 2′ deoxy uridine | 2′ dU | U | NO |
| 2′ fluorouridine | — | U | NO |
| 2′-Deoxy-2′-a-aminouridine TP | — | U | NO |
| 2′-Deoxy-2′-a-azidouridine TP | — | U | NO |
| 2-methylpseudouridine | m3Ψ | U | NO |
| 3 (3 amino-3 carboxypropyl)uracil | — | U | NO |
| 4 (thio)pseudouracil | — | U | NO |
| 4-(thio)pseudouracil | — | U | NO |
| 4-(thio)uracil | — | U | NO |
| 4-thiouracil | — | U | NO |
| 5 (1,3-diazole-1-alkyl)uracil | — | U | NO |
| 5 (2-aminopropyl)uracil | — | U | NO |
| 5 (aminoalkyl)uracil | — | U | NO |
| 5 (dimethylaminoalkyl)uracil | — | U | NO |
| 5 (guanidiniumalkyl)uracil | — | U | NO |
| 5 (methoxycarbonylmethyl)-2- | — | U | NO |
| (thio)uracil | | | |
| 5 (methoxycarbonyl-methyl)uracil | — | U | NO |
| 5 (methyl) 2 (thio)uracil | — | U | NO |
| 5 (methyl) 2,4 (dithio)uracil | — | U | NO |
| 5 (methyl) 4 (thio)uracil | — | U | NO |
| 5 (methylaminomethyl)-2 (thio)uracil | — | U | NO |
| 5 (methylaminomethyl)-2,4 | — | U | NO |
| (dithio)uracil | | | |
| 5 (methylaminomethyl)-4 (thio)uracil | — | U | NO |
| 5 (propynyl)uracil | — | U | NO |
| 5 (trifluoromethyl)uracil | — | U | NO |
| 5-(2-aminopropyl)uracil | — | U | NO |
| 5-(alkyl)-2-(thio)pseudouracil | — | U | NO |
| 5-(alkyl)-2,4 (dithio)pseudouracil | — | U | NO |
| 5-(alkyl)-4 (thio)pseudouracil | — | U | NO |
| 5-(alkyl)pseudouracil | — | U | NO |
| 5-(alkyl)uracil | — | U | NO |
| 5-(alkynyl)uracil | — | U | NO |
| 5-(allylamino)uracil | — | U | NO |
| 5-(cyanoalkyl)uracil | — | U | NO |
| 5-(dialkylaminoalkyl)uracil | — | U | NO |
| 5-(dimethylaminoalkyl)uracil | — | U | NO |
| 5-(guanidiniumalkyl)uracil | — | U | NO |
| 5-(halo)uracil | — | U | NO |
| 5-(1,3-diazole-1-alkyl)uracil | — | U | NO |
| 5-(methoxy)uracil | — | U | NO |
| 5-(methoxycarbonylmethyl)-2- | — | U | NO |
| (thio)uracil | | | |
| 5-(methoxycarbonyl-methyl)uracil | — | U | NO |
| 5-(methyl) 2(thio)uracil | — | U | NO |
| 5-(methyl) 2,4 (dithio)uracil | — | U | NO |
| 5-(methyl) 4 (thio)uracil | — | U | NO |
| 5-(methyl)-2-(thio)pseudouracil | — | U | NO |
| 5-(methyl)-2,4 (dithio)pseudouracil | — | U | NO |
| 5-(methyl)-4 (thio)pseudouracil | — | U | NO |
| 5-(methyl)pseudouracil | — | U | NO |
| 5-(methylaminomethyl)-2 (thio)uracil | — | U | NO |
| 5-(methylaminomethyl)-2,4 | — | U | NO |
| (dithio)uracil | | | |
| 5-(methylaminomethyl)-4-(thio)uracil | — | U | NO |
| 5-(propynyl)uracil | — | U | NO |
| 5-(trifluoromethyl)uracil | — | U | NO |
| 5-aminoallyl-uridine | — | U | NO |
| 5-bromo-uridine | — | U | NO |
| 5-iodo-uridine | — | U | NO |
| 5-uracil | — | U | NO |
| 6 (azo)uracil | — | U | NO |
| 6-(azo)uracil | — | U | NO |
| 6-aza-uridine | — | U | NO |
| allyamino-uracil | — | U | NO |
| aza uracil | — | U | NO |
| deaza uracil | — | U | NO |
| N3 (methyl)uracil | — | U | NO |
| Pseudo-UTP-1-2-ethanoic acid | — | U | NO |
| pseudouracil | — | U | NO |
| 4-Thio-pseudo-UTP | — | U | NO |
| 1-carboxymethyl-pseudouridine | — | U | NO |
| 1-methyl-1-deaza-pseudouridine | — | U | NO |
| 1-propynyl-uridine | — | U | NO |
| 1-taurinomethyl-1-methyl-uridine | — | U | NO |
| 1-taurinomethyl-4-thio-uridine | — | U | NO |
| 1-taurinomethyl-pseudouridine | — | U | NO |
| 2-methoxy-4-thio-pseudouridine | — | U | NO |
| 2-thio-1-methyl-1-deaza-pseudouridine | — | U | NO |
| 2-thio-1-methyl-pseudouridine | — | U | NO |
| 2-thio-5-aza-uridine | — | U | NO |
| 2-thio-dihydropseudouridine | — | U | NO |
| 2-thio-dihydrouridine | — | U | NO |
| 2-thio-pseudouridine | — | U | NO |
| 4-methoxy-2-thio-pseudouridine | — | U | NO |
| 4-methoxy-pseudouridine | — | U | NO |
| 4-thio-1-methyl-pseudouridine | — | U | NO |
| 4-thio-pseudouridine | — | U | NO |
| 5-aza-uridine | — | U | NO |
| dihydropseudouridine | — | U | NO |
| (±)1-(2-Hydroxypropyl)pseudouridine | — | U | NO |
| TP | | | |
| (2R)-1-(2-Hydroxypropyl)pseudouridine | — | U | NO |
| TP | | | |
| (2S)-1-(2-Hydroxypropyl)pseudouridine | — | U | NO |
| TP | | | |
| (E)-5-(2-Bromo-vinyl)ara-uridine TP | — | U | NO |
| (E)-5-(2-Bromo-vinyl)uridine TP | — | U | NO |
| (Z)-5-(2-Bromo-vinyl)ara-uridine TP | — | U | NO |
| (Z)-5-(2-Bromo-vinyl)uridine TP | — | U | NO |
| 1-(2,2,2-Trifluoroethyl)-pseudo-UTP | — | U | NO |
| 1-(2,2,3,3,3- | — | U | NO |
| Pentafluoropropyl)pseudouridine TP | | | |
| 1-(2,2-Diethoxyethyl)pseudouridine TP | — | U | NO |
| 1-(2,4,6-Trimethylbenzyl)pseudouridine | — | U | NO |
| TP | | | |
| 1-(2,4,6-Trimethyl-benzyl)pseudo-UTP | — | U | NO |
| 1-(2,4,6-Trimethyl-phenyl)pseudo-UTP | — | U | NO |
| 1-(2-Amino-2-carboxyethyl)pseudo- | — | U | NO |
| UTP | | | |
| 1-(2-Amino-ethyl)pseudo-UTP | — | U | NO |
| 1-(2-Hydroxyethyl)pseudouridine TP | — | U | NO |
| 1-(2-Methoxyethyl)pseudouridine TP | — | U | NO |
| 1-(3,4-Bis- | — | U | NO |
| trifluoromethoxybenzyl)pseudouridine | | | |
| TP | | | |
| 1-(3,4-Dimethoxybenzyl)pseudouridine | — | U | NO |
| TP | | | |
| 1-(3-Amino-3-carboxypropyl)pseudo- | — | U | NO |
| UTP | | | |
| 1-(3-Amino-propyl)pseudo-UTP | — | U | NO |
| 1-(3-Cyclopropyl-prop-2- | — | U | NO |
| ynyl)pseudouridine TP | | | |
| 1-(4-Amino-4-carboxybutyl)pseudo- | — | U | NO |
| UTP | | | |
| 1-(4-Amino-benzyl)pseudo-UTP | — | U | NO |
| 1-(4-Amino-butyl)pseudo-UTP | — | U | NO |
| 1-(4-Amino-phenyl)pseudo-UTP | — | U | NO |
| 1-(4-Azidobenzyl)pseudouridine TP | — | U | NO |
| 1-(4-Bromobenzyl)pseudouridine TP | — | U | NO |
| 1-(4-Chlorobenzyl)pseudouridine TP | — | U | NO |
| 1-(4-Fluorobenzyl)pseudouridine TP | — | U | NO |
| 1-(4-Iodobenzyl)pseudouridine TP | — | U | NO |
| 1-(4- | — | U | NO |
| Methanesulfonylbenzyl)pseudouridine | | | |
| TP | | | |
| 1-(4-Methoxybenzyl)pseudouridine TP | — | U | NO |
| 1-(4-Methoxy-benzyl)pseudo-UTP | — | U | NO |
| 1-(4-Methoxy-phenyl)pseudo-UTP | — | U | NO |
| 1-(4-Methylbenzyl)pseudouridine TP | — | U | NO |
| 1-(4-Methyl-benzyl)pseudo-UTP | — | U | NO |
| 1-(4-Nitrobenzyl)pseudouridine TP | — | U | NO |
| 1-(4-Nitro-benzyl)pseudo-UTP | — | U | NO |
| 1(4-Nitro-phenyl)pseudo-UTP | — | U | NO |
| 1-(4-Thiomethoxybenzyl)pseudouridine | — | U | NO |
| TP | | | |
| 1-(4- | — | U | NO |
| Trifluoromethoxybenzyl)pseudouridine | | | |
| TP | | | |
| 1-(4-Trifluoromethylbenzyl)- | — | U | NO |
| pseudouridine TP | | | |
| 1-(5-Amino-pentyl)pseudo-UTP | — | U | NO |
| 1-(6-Amino-hexyl)pseudo-UTP | — | U | NO |
| 1,6-Dimethyl-pseudo-UTP | — | U | NO |
| 1-[3-(2-{2-[2-(2-Aminoethoxy)-ethoxy]- | — | U | NO |
| ethoxy}-ethoxy)-propionyl]- | | | |
| pseudouridine TP | | | |
| 1-{3-[2-(2-Aminoethoxy)-ethoxy]- | — | U | NO |
| propionyl} pseudouridine TP | | | |
| 1-Acetylpseudouridine TP | — | U | NO |
| 1-Alkyl-6-(1-propynyl)-pseudo-UTP | — | U | NO |
| 1-Alkyl-6-(2-propynyl)-pseudo-UTP | — | U | NO |
| 1-Alkyl-6-allyl-pseudo-UTP | — | U | NO |
| 1-Alkyl-6-ethynyl-pseudo-UTP | — | U | NO |
| 1-Alkyl-6-homoallyl-pseudo-UTP | — | U | NO |
| 1-Alkyl-6-vinyl-pseudo-UTP | — | U | NO |
| 1-Allylpseudouridine TP | — | U | NO |
| 1-Aminomethyl-pseudo-UTP | — | U | NO |
| 1-Benzoylpseudouridine TP | — | U | NO |
| 1-Benzyloxymethylpseudouridine TP | — | U | NO |
| 1-Benzyl-pseudo-UTP | — | U | NO |
| 1-Biotinyl-PEG2-pseudouridine TP | — | U | NO |
| 1-Biotinylpseudouridine TP | — | U | NO |
| 1-Butyl-pseudo-UTP | — | U | NO |
| 1-Cyanomethylpseudouridine TP | — | U | NO |
| 1-Cyclobutylmethyl-pseudo-UTP | — | U | NO |
| 1-Cyclobutyl-pseudo-UTP | — | U | NO |
| 1-Cycloheptylmethyl-pseudo-UTP | — | U | NO |
| 1-Cycloheptyl-pseudo-UTP | — | U | NO |
| 1-Cyclohexylmethyl-pseudo-UTP | — | U | NO |
| 1-Cyclohexyl-pseudo-UTP | — | U | NO |
| 1-Cyclooctylmethyl-pseudo-UTP | — | U | NO |
| 1-Cyclooctyl-pseudo-UTP | — | U | NO |
| 1-Cyclopentylmethyl-pseudo-UTP | — | U | NO |
| 1-Cyclopentyl-pseudo-UTP | — | U | NO |
| 1-Cyclopropylmethyl-pseudo-UTP | — | U | NO |
| 1-Cyclopropyl-pseudo-UTP | — | U | NO |
| 1-Ethyl-pseudo-UTP | — | U | NO |
| 1-Hexyl-pseudo-UTP | — | U | NO |
| 1-Homoallylpseudouridine TP | — | U | NO |
| 1-Hydroxymethylpseudouridine TP | — | U | NO |
| 1-iso-propyl-pseudo-UTP | — | U | NO |
| 1-Me-2-thio-pseudo-UTP | — | U | NO |
| 1-Me-4-thio-pseudo-UTP | — | U | NO |
| 1-Me-alpha-thio-pseudo-UTP | — | U | NO |
| 1-Methanesulfonylmethylpseudouridine | — | U | NO |
| TP | | | |
| 1-Methoxymethylpseudouridine TP | — | U | NO |
| 1-Methyl-6-(2,2,2-Trifluoroethyl)- | — | U | NO |
| pseudo-UTP | | | |
| 1-Methyl-6-(4-morpholino)-pseudo- | — | U | NO |
| UTP | | | |
| 1-Methyl-6-(4-thiomorpholino)-pseudo- | — | U | NO |
| UTP | | | |
| 1-Methyl-6-(substituted phenyl)pseudo- | — | U | NO |
| UTP | | | |
| 1-Methyl-6-amino-pseudo-UTP | — | U | NO |
| 1-Methyl-6-azido-pseudo-UTP | — | U | NO |
| 1-Methyl-6-bromo-pseudo-UTP | — | U | NO |
| 1-Methyl-6-butyl-pseudo-UTP | — | U | NO |
| 1-Methyl-6-chloro-pseudo-UTP | — | U | NO |
| 1-Methyl-6-cyano-pseudo-UTP | — | U | NO |
| 1-Methyl-6-dimethylamino-pseudo-UTP | — | U | NO |
| 1-Methyl-6-ethoxy-pseudo-UTP | — | U | NO |
| 1-Methyl-6-ethylcarboxylate-pseudo- | — | U | NO |
| UTP | | | |
| 1-Methyl-6-ethyl-pseudo-UTP | — | U | NO |
| 1-Methyl-6-fluoro-pseudo-UTP | — | U | NO |
| 1-Methyl-6-formyl-pseudo-UTP | — | U | NO |
| 1-Methyl-6-hydroxyamino-pseudo-UTP | — | U | NO |
| 1-Methyl-6-hydroxy-pseudo-UTP | — | U | NO |
| 1-Methyl-6-iodo-pseudo-UTP | — | U | NO |
| 1-Methyl-6-iso-propyl-pseudo-UTP | — | U | NO |
| 1-Methyl-6-methoxy-pseudo-UTP | — | U | NO |
| 1-Methyl-6-methylamino-pseudo-UTP | — | U | NO |
| 1-Methyl-6-phenyl-pseudo-UTP | — | U | NO |
| 1-Methyl-6-propyl-pseudo-UTP | — | U | NO |
| 1-Methyl-6-tert-butyl-pseudo-UTP | — | U | NO |
| 1-Methyl-6-trifluoromethoxy-pseudo- | — | U | NO |
| UTP | | | |
| 1-Methyl-6-trifluoromethyl-pseudo-UTP | — | U | NO |
| 1-Morpholinomethylpseudouridine TP | — | U | NO |
| 1-Pentyl-pseudo-UTP | — | U | NO |
| 1-Phenyl-pseudo-UTP | — | U | NO |
| 1-Pivaloylpseudouridine TP | — | U | NO |
| 1-Propargylpseudouridine TP | — | U | NO |
| 1-Propyl-pseudo-UTP | — | U | NO |
| 1-propynyl-pseudouridine | — | U | NO |
| 1-p-tolyl-pseudo-UTP | — | U | NO |
| 1-tert-Butyl-pseudo-UTP | — | U | NO |
| 1-Thiomethoxymethylpseudouridine TP | — | U | NO |
| 1-Thiomorpholinomethylpseudouridine | — | U | NO |
| TP | | | |
| 1-Trifluoroacetylpseudouridine TP | — | U | NO |
| 1-Trifluoromethyl-pseudo-UTP | — | U | NO |
| 1-Vinylpseudouridine TP | — | U | NO |
| 2,2′-anhydro-uridine TP | — | U | NO |
| 2′-bromo-deoxyuridine TP | — | U | NO |
| 2′-F-5-Methyl-2′-deoxy-UTP | — | U | NO |
| 2′-OMe-5-Me-UTP | — | U | NO |
| 2′-OMe-pseudo-UTP | — | U | NO |
| 2′-a-Ethynyluridine TP | — | U | NO |
| 2′-a-Trifluoromethyluridine TP | — | U | NO |
| 2′-b-Ethynyluridine TP | — | U | NO |
| 2′-b-Trifluoromethyluridine TP | — | U | NO |
| 2′-Deoxy-2′,2′-difluorouridine TP | — | U | NO |
| 2′-Deoxy-2′-a-mercaptouridine TP | — | U | NO |
| 2′-Deoxy-2′-a-thiomethoxyuridine TP | — | U | NO |
| 2′-Deoxy-2′-b-aminouridine TP | — | U | NO |
| 2′-Deoxy-2′-b-azidouridine TP | — | U | NO |
| 2′-Deoxy-2′-b-bromouridine TP | — | U | NO |
| 2′-Deoxy-2′-b-chlorouridine TP | — | U | NO |
| 2′-Deoxy-2′-b-fluorouridine TP | — | U | NO |
| 2′-Deoxy-2′-b-iodouridine TP | — | U | NO |
| 2′-Deoxy-2′-b-mercaptouridine TP | — | U | NO |
| 2′-Deoxy-2′-b-thiomethoxyuridine TP | — | U | NO |
| 2-methoxy-4-thio-uridine | — | U | NO |
| 2-methoxyuridine | — | U | NO |
| 2′-O-Methyl-5-(1-propynyl)uridine TP | — | U | NO |
| 3-Alkyl-pseudo-UTP | — | U | NO |
| 4′-Azidouridine TP | — | U | NO |
| 4′-Carbocyclic uridine TP | — | U | NO |
| 4′-Ethynyluridine TP | — | U | NO |
| 5-(1-Propynyl)ara-uridine TP | — | U | NO |
| 5-(2-Furanyl)uridine TP | — | U | NO |
| 5-Cyanouridine TP | — | U | NO |
| 5-Dimethylaminouridine TP | — | U | NO |
| 5′-Homo-uridine TP | — | U | NO |
| 5-iodo-2′-fluoro-deoxyuridine TP | — | U | NO |
| 5-Phenylethynyluridine TP | — | U | NO |
| 5-Trideuteromethyl-6-deuterouridine TP | — | U | NO |
| 5-Trifluoromethyl-Uridine TP | — | U | NO |
| 5-Vinylarauridine TP | — | U | NO |
| 6-(2,2,2-Trifluoroethyl)-pseudo-UTP | — | U | NO |
| 6-(4-Morpholino)-pseudo-UTP | — | U | NO |
| 6-(4-Thiomorpholino)-pseudo-UTP | — | U | NO |
| 6-(Substituted-Phenyl)-pseudo-UTP | — | U | NO |
| 6-Amino-pseudo-UTP | — | U | NO |
| 6-Azido-pseudo-UTP | — | U | NO |
| 6-Bromo-pseudo-UTP | — | U | NO |
| 6-Butyl-pseudo-UTP | — | U | NO |
| 6-Chloro-pseudo-UTP | — | U | NO |
| 6-Cyano-pseudo-UTP | — | U | NO |
| 6-Dimethylamino-pseudo-UTP | — | U | NO |
| 6-Ethoxy-pseudo-UTP | — | U | NO |
| 6-Ethylcarboxylate-pseudo-UTP | — | U | NO |
| 6-Ethyl-pseudo-UTP | — | U | NO |
| 6-Fluoro-pseudo-UTP | — | U | NO |
| 6-Formyl-pseudo-UTP | — | U | NO |
| 6-Hydroxyamino-pseudo-UTP | — | U | NO |
| 6-Hydroxy-pseudo-UTP | — | U | NO |
| 6-Iodo-pseudo-UTP | — | U | NO |
| 6-iso-Propyl-pseudo-UTP | — | U | NO |
| 6-Methoxy-pseudo-UTP | — | U | NO |
| 6-Methylamino-pseudo-UTP | — | U | NO |
| 6-Methyl-pseudo-UTP | — | U | NO |
| 6-Phenyl-pseudo-UTP | — | U | NO |
| 6-Phenyl-pseudo-UTP | — | U | NO |
| 6-Propyl-pseudo-UTP | — | U | NO |
| 6-tert-Butyl-pseudo-UTP | — | U | NO |
| 6-Trifluoromethoxy-pseudo-UTP | — | U | NO |
| 6-Trifluoromethyl-pseudo-UTP | — | U | NO |
| Alpha-thio-pseudo-UTP | — | U | NO |
| Pseudouridine 1-(4-methyl- | — | U | NO |
| benzenesulfonic acid) TP | | | |
| Pseudouridine 1-(4-methylbenzoic acid) | — | U | NO |
| TP | | | |
| Pseudouridine TP 1-[3-(2- | — | U | NO |
| ethoxy)]propionic acid | | | |
| Pseudouridine TP 1-[3-{2-(2-[2- | — | U | NO |
| (2-ethoxy)-ethoxy]-ethoxy)- | | | |
| ethoxy}]propionic acid | | | |
| Pseudouridine TP 1-[3-{2-(2-[2-{2(2- | — | U | NO |
| ethoxy)-ethoxy}-ethoxy]-ethoxy)- | | | |
| ethoxy}]propionic acid | | | |
| Pseudouridine TP 1-[3-{2-(2-[2- | — | U | NO |
| ethoxy]-ethoxy)-ethoxy}]propionic acid | | | |
| Pseudouridine TP 1-[3-{2-(2-ethoxy)- | — | U | NO |
| ethoxy}] propionic acid | | | |
| Pseudouridine TP 1-methylphosphonic | — | U | NO |
| acid | | | |
| Pseudouridine TP 1-methylphosphonic | — | U | NO |
| acid diethyl ester | | | |
| Pseudo-UTP-N1-3-propionic acid | — | U | NO |
| Pseudo-UTP-N1-4-butanoic acid | — | U | NO |
| Pseudo-UTP-N1-5-pentanoic acid | — | U | NO |
| Pseudo-UTP-N1-6-hexanoic acid | — | U | NO |
| Pseudo-UTP-N1-7-heptanoic acid | — | U | NO |
| Pseudo-UTP-N1-methyl-p-benzoic acid | — | U | NO |
| Pseudo-UTP-N1-p-benzoic acid | — | U | NO |
| wybutosine | yW | W | YES |
| hydroxywybutosine | OHyW | W | YES |
| isowyosine | imG2 | W | YES |
| peroxywybutosine | o2yW | W | YES |
| undermodified hydroxywybutosine | OHyW* | W | YES |
| 4-demethylwyosine | imG-14 | W | YES |

[0348] Other modifications which may be useful in the polynucleotides of the present invention are listed in Table 6.

TABLE 6
Additional Modification types

| Name | Type |
|---|---|
| 2,6-(diamino)purine | Other |
| 1-(aza)-2-(thio)-3-(aza)-phenoxazin-1-yl | Other |
| 1,3-(diaza)-2-(oxo)-phenthiazin-1-yl | Other |
| 1,3-(diaza)-2-(oxo)-phenoxazin-1-yl | Other |
| 1,3,5-(triaza)-2,6-(dioxa)-naphthalene | Other |
| 2 (amino)purine | Other |
| 2,4,5-(trimethyl)phenyl | Other |
| 2′ methyl, 2′amino, 2′azido, 2′fluro-cytidine | Other |
| 2′ methyl, 2′amino, 2′azido, 2′fluro-adenine | Other |
| 2′methyl, 2′amino, 2′azido, 2′fluro-uridine | Other |
| 2′-amino-2′-deoxyribose | Other |
| 2-amino-6-Chloro-purine | Other |
| 2-aza-inosinyl | Other |
| 2′-azido-2′-deoxyribose | Other |
| 2′fluoro-2′-deoxyribose | Other |
| 2′-fluoro-modified bases | Other |
| 2′-O-methyl-ribose | Other |
| 2-oxo-7-aminopyridopyrimidin-3-yl | Other |
| 2-oxo-pyridopyrimidine-3-yl | Other |
| 2-pyridinone | Other |
| 3 nitropyrrole | Other |
| 3-(methyl)-7-(propynyl)isocarbostyrilyl | Other |
| 3-(methyl)isocarbostyrilyl | Other |
| 4-(fluoro)-6-(methyl)benzimidazole | Other |
| 4-(methyl)benzimidazole | Other |
| 4-(methyl)indolyl | Other |
| 4,6-(dimethyl)indolyl | Other |
| 5 nitroindole | Other |
| 5 substituted pyrimidines | Other |
| 5-(methyl)isocarbostyrilyl | Other |
| 5-nitroindole | Other |
| 6-(aza)pyrimidine | Other |
| 6-(azo)thymine | Other |
| 6-(methyl)-7-(aza)indolyl | Other |
| 6-chloro-purine | Other |
| 6-phenyl-pyrrolo-pyrimidin-2-on-3-yl | Other |
| 7-(aminoalkylhydroxy)-1-(aza)-2-(thio)-3-(aza)-phenthiazin-1-yl | Other |
| 7-(aminoalkylhydroxy)-1-(aza)-2-(thio)-3-(aza)-phenoxazin-1-yl | Other |
| 7-(aminoalkylhydroxy)-1,3-(diaza)-2-(oxo)-phenoxazin-1-yl | Other |
| 7-(aminoalkylhydroxy)-1,3-(diaza)-2-(oxo)-phenthiazin-1-yl | Other |
| 7-(aminoalkylhydroxy)-1,3-(diaza)-2-(oxo)-phenoxazin-1-yl | Other |
| 7-(aza)indolyl | Other |
| 7-(guanidiniumalkylhydroxy)-1-(aza)-2-(thio)-3-(aza)- | Other |
| phenoxazinl-yl | |
| 7-(guanidiniumalkylhydroxy)-1-(aza)-2-(thio)-3-(aza)-phenthiazin- | Other |
| 1-yl | |
| 7-(guanidiniumalkylhydroxy)-1-(aza)-2-(thio)-3-(aza)-phenoxazin- | Other |
| 1-yl | |
| 7-(guanidiniumalkylhydroxy)-1,3-(diaza)-2-(oxo)-phenoxazin-1-yl | Other |
| 7-(guanidiniumalkyl-hydroxy)-1,3-(diaza)-2-(oxo)-phenthiazin-1- | Other |
| yl | |
| 7-(guanidiniumalkylhydroxy)-1,3-(diaza)-2-(oxo)-phenoxazin-1-yl | Other |
| 7-(propynyl)isocarbostyrilyl | Other |
| 7-(propynyl)isocarbostyrilyl, propynyl-7-(aza)indolyl | Other |
| 7-deaza-inosinyl | Other |
| 7-substituted 1-(aza)-2-(thio)-3-(aza)-phenoxazin-1-yl | Other |
| 7-substituted 1,3-(diaza)-2-(oxo)-phenoxazin-1-yl | Other |
| 9-(methyl)-imidizopyridinyl | Other |
| aminoindolyl | Other |
| anthracenyl | Other |
| bis-ortho-(aminoalkylhydroxy)-6-phenyl-pyrrolo-pyrimidin-2-on-3- | Other |
| yl | |
| bis-ortho-substituted-6-phenyl-pyrrolo-pyrimidin-2-on-3-yl | Other |
| difluorotolyl | Other |
| hypoxanthine | Other |
| imidizopyridinyl | Other |
| inosinyl | Other |
| isocarbostyrilyl | Other |
| isoguanisine | Other |
| N2-substituted purines | Other |
| N6-methyl-2-amino-purine | Other |
| N6-substituted purines | Other |
| N-alkylated derivative | Other |
| napthalenyl | Other |
| nitrobenzimidazolyl | Other |
| nitroimidazolyl | Other |
| nitroindazolyl | Other |
| nitropyrazolyl | Other |
| nubularine | Other |
| O6-substituted purines | Other |
| O-alkylated derivative | Other |
| ortho-(aminoalkylhydroxy)-6-phenyl-pyrrolo-pyrimidin-2-on-3-yl | Other |
| ortho-substituted-6-phenyl-pyrrolo-pyrimidin-2-on-3-yl | Other |
| Oxoformycin TP | Other |
| para-(aminoalkylhydroxy)-6-phenyl-pyrrolo-pyrimidin-2-on-3-yl | Other |
| para-substituted-6-phenyl-pyrrolo-pyrimidin-2-on-3-yl | Other |
| pentacenyl | Other |
| phenanthracenyl | Other |
| phenyl | Other |
| propynyl-7-(aza)indolyl | Other |
| pyrenyl | Other |
| pyridopyrimidin-3-yl | Other |
| pyridopyrimidin-3-yl, 2-oxo-7-amino-pyridopyrimidin-3-yl | Other |
| pyrrolo-pyrimidin-2-on-3-yl | Other |
| pyrrolopyrimidinyl | Other |
| pyrrolopyrizinyl | Other |
| stilbenzyl | Other |
| substituted 1,2,4-triazoles | Other |
| tetracenyl | Other |
| tubercidine | Other |
| xanthine | Other |
| Xanthosine-5′-TP | Other |
| 2-thio-zebularine | Other |
| 5-aza-2-thio-zebularine | Other |
| 7-deaza-2-amino-purine | Other |
| pyridin-4-one ribonucleoside | Other |
| 2-Amino-riboside-TP | Other |
| Formycin A TP | Other |
| Formycin B TP | Other |
| Pyrrolosine TP | Other |
| 2′-OH-ara-adenosine TP | Other |
| 2′-OH-ara-cytidine TP | Other |
| 2′-OH-ara-uridine TP | Other |
| 2′-OH-ara-guanosine TP | Other |
| 5-(2-carbomethoxyvinyl)uridine TP | Other |
| N6-(19-Amino-pentaoxanonadecyl)adenosine TP | Other |

[0349] The polynucleotides can include any useful linker between the nucleosides. Such linkers, including backbone modifications are given in Table 7.

TABLE 7
Linker modifications

| Name | TYPE |
|---|---|
| 3′-alkylene phosphonates | Linker |
| 3′-amino phosphoramidate | Linker |
| alkene containing backbones | Linker |
| aminoalkylphosphoramidates | Linker |
| aminoalkylphosphotriesters | Linker |
| boranophosphates | Linker |
| —CH2—0—N(CH3)—CH2— | Linker |
| —CH2—N(CH3)—N(CH3)—CH2— | Linker |
| —CH2—NH—CH2— | Linker |
| chiral phosphonates | Linker |
| chiral phosphorothioates | Linker |
| formacetyl and thioformacetyl backbones | Linker |
| methylene (methylimino) | Linker |
| methylene formacetyl and thioformacetyl backbones | Linker |
| methyleneimino and methylenehydrazino backbones | Linker |
| morpholino linkages | Linker |
| —N(CH3)—CH2—CH2— | Linker |
| oligonucleosides with heteroatom internucleoside linkage | Linker |
| phosphinates | Linker |
| phosphoramidates | Linker |
| phosphorodithioates | Linker |
| phosphorothioate internucleoside linkages | Linker |
| phosphorothioates | Linker |
| phosphotriesters | Linker |
| PNA | Linker |
| siloxane backbones | Linker |
| sulfamate backbones | Linker |
| sulfide sulfoxide and sulfone backbones | Linker |
| sulfonate and sulfonamide backbones | Linker |
| thionoalkylphosphonates | Linker |
| thionoalkylphosphotriesters | Linker |
| thionophosphoramidates | Linker |

[0350] The polynucleotides can include any useful modification, such as to the sugar, the nucleobase, or the internucleoside linkage (e.g. to a linking phosphate/to a phosphodiester linkage/to the phosphodiester backbone). One or more atoms of a pyrimidine nucleobase may be replaced or substituted with optionally substituted amino, optionally substituted thiol, optionally substituted alkyl (e.g., methyl or ethyl), or halo (e.g., chloro or fluoro). In certain embodiments, modifications (e.g., one or more modifications) are present in each of the sugar and the internucleoside linkage. Modifications according to the present invention may be modifications of ribonucleic acids (RNAs) to deoxyribonucleic acids (DNAs), threose nucleic acids (TNAs), glycol nucleic acids (GNAs), peptide nucleic acids (PNAs), locked nucleic acids (LNAs) or hybrids thereof). Additional modifications are described herein.

[0351] In some embodiments, the polynucleotides of the invention do not substantially induce an innate immune response of a cell into which the mRNA is introduced. Featues of an induced innate immune response include 1) increased expression of pro-inflammatory cytokines, 2) activation of intracellular PRRs (RIG-I, MDA5, etc, and/or 3) termination or reduction in protein translation.

[0352] In certain embodiments, it may desirable to intracellularly degrade a polynucleotide introduced into the cell. For example, degradation of a polynucleotide may be preferable if precise timing of protein production is desired. Thus, in some embodiments, the invention provides a polynucleotide containing a degradation domain, which is capable of being acted on in a directed manner within a cell.

[0353] Any of the regions of the polynucleotides may be chemically modified as taught herein or as taught in International Patent Publication No. WO2013052523 (Attorney Docket Number M9) and International Patent Application No. PCT/US2013/75177 (Attorney Docket Number M36), the contents of each of which are incorporated herein by reference in its entirety.

### Modified Polynucleotide Molecules

[0354] The present invention also includes building blocks, e.g., modified ribonucleosides, and modified ribonucleotides, of polynucleotide molecules. For example, these building blocks can be useful for preparing the polynucleotides of the invention. Such building blocks are taught in International Patent Publication No. WO2013052523 (Attorney Docket Number M9) and International Patent Application No. PCT/US2013/75177 (Attorney Docket Number M36), the contents of each of which are incorporated herein by reference in its entirety.

### Modifications on the Sugar

[0355] The modified nucleosides and nucleotides (e.g., building block molecules), which may be incorporated into a polynucleotide (e.g., RNA or mRNA, as described herein), can be modified on the sugar of the ribonucleic acid. For example, the 2′ hydroxyl group (OH) can be modified or replaced with a number of different substituents. Exemplary substitutions at the 2′-position include, but are not limited to, H, halo, optionally substituted C₁₋₆ alkyl; optionally substituted C₁₋₆ alkoxy; optionally substituted C₆₋₁₀ aryloxy; optionally substituted C₃₋₈ cycloalkyl; optionally substituted C₃₋₈ cycloalkoxy; optionally substituted C₆₋₁₀ aryloxy; optionally substituted C₆₋₁₀ aryl-C₁₋₆ alkoxy, optionally substituted C₁₋₁₂ (heterocyclyl)oxy; a sugar (e.g., ribose, pentose, or any described herein); a polyethyleneglycol (PEG), —O(CH₂CH₂O)ₙCH₂CH₂OR, where R is H or optionally substituted alkyl, and n is an integer from 0 to 20 (e.g., from 0 to 4, from 0 to 8, from 0 to 10, from 0 to 16, from 1 to 4, from 1 to 8, from 1 to 10, from 1 to 16, from 1 to 20, from 2 to 4, from 2 to 8, from 2 to 10, from 2 to 16, from 2 to 20, from 4 to 8, from 4 to 10, from 4 to 16, and from 4 to 20); “locked” nucleic acids (LNA) in which the 2′-hydroxyl is connected by a C₁₋₆ alkylene or C₁₋₆ heteroalkylene bridge to the 4′-carbon of the same ribose sugar, where exemplary bridges included methylene, propylene, ether, or amino bridges; aminoalkyl, as defined herein; aminoalkoxy, as defined herein; amino as defined herein; and amino acid, as defined herein

[0356] Generally, RNA includes the sugar group ribose, which is a 5-membered ring having an oxygen. Exemplary, non-limiting modified nucleotides include replacement of the oxygen in ribose (e.g., with S, Se, or alkylene, such as methylene or ethylene); addition of a double bond (e.g., to replace ribose with cyclopentenyl or cyclohexenyl); ring contraction of ribose (e.g., to form a 4-membered ring of cyclobutane or oxetane); ring expansion of ribose (e.g., to form a 6- or 7-membered ring having an additional carbon or heteroatom, such as for anhydrohexitol, altritol, mannitol, cyclohexanyl, cyclohexenyl, and morpholino that also has a phosphoramidate backbone); multicyclic forms (e.g., tricyclo; and “unlocked” forms, such as glycol nucleic acid (GNA) (e.g., R-GNA or S-GNA, where ribose is replaced by glycol units attached to phosphodiester bonds), threose nucleic acid (TNA, where ribose is replace with a-L-threofuranosyl-(3′→2′)), and peptide nucleic acid (PNA, where 2-amino-ethyl-glycine linkages replace the ribose and phosphodiester backbone). The sugar group can also contain one or more carbons that possess the opposite stereochemical configuration than that of the corresponding carbon in ribose. Thus, a polynucleotide molecule can include nucleotides containing, e.g., arabinose, as the sugar. Such sugar modifications are taught International Patent Publication No. WO2013052523 (Attorney Docket Number M9) and International Patent Application No. PCT/US2013/75177 (Attorney Docket Number M36), the contents of each of which are incorporated herein by reference in its entirety.

### Modifications on the Nucleobase

[0357] The present disclosure provides for modified nucleosides and nucleotides. As described herein “nucleoside” is defined as a compound containing a sugar molecule (e.g., a pentose or ribose) or a derivative thereof in combination with an organic base (e.g., a purine or pyrimidine) or a derivative thereof (also referred to herein as “nucleobase”). As described herein, “nucleotide” is defined as a nucleoside including a phosphate group. The modified nucleotides may by synthesized by any useful method, as described herein (e.g., chemically, enzymatically, or recombinantly to include one or more modified or non-natural nucleosides). The polynucleotides may comprise a region or regions of linked nucleosides. Such regions may have variable backbone linkages. The linkages may be standard phosphoester linkages, in which case the polynucleotides would comprise regions of nucleotides.

[0358] The modified nucleotide base pairing encompasses not only the standard adenosine-thymine, adenosine-uracil, or guanosine-cytosine base pairs, but also base pairs formed between nucleotides and/or modified nucleotides comprising non-standard or modified bases, wherein the arrangement of hydrogen bond donors and hydrogen bond acceptors permits hydrogen bonding between a non-standard base and a standard base or between two complementary non-standard base structures. One example of such non-standard base pairing is the base pairing between the modified nucleotide inosine and adenine, cytosine or uracil.

[0359] The modified nucleosides and nucleotides can include a modified nucleobase. Examples of nucleobases found in RNA include, but are not limited to, adenine, guanine, cytosine, and uracil. Examples of nucleobase found in DNA include, but are not limited to, adenine, guanine, cytosine, and thymine. Such modified nucleobases (including the distinctions between naturally occurring and non-naturally occurring) are taught in International Patent Publication No. WO2013052523 (Attorney Docket Number M9) and International Patent Application No. PCT/US2013/75177 (Attorney Docket Number M36), the contents of each of which are incorporated herein by reference in its entirety.

### Combinations of Modified Sugars, Nucleobases, and Internucleoside Linkages

[0360] The polynucleotides of the invention can include a combination of modifications to the sugar, the nucleobase, and/or the internucleoside linkage. These combinations can include any one or more modifications described herein.

[0361] Examples of modified nucleotides and modified nucleotide combinations are provided below in Table 8. These combinations of modified nucleotides can be used to form the polynucleotides of the invention. Unless otherwise noted, the modified nucleotides may be completely substituted for the natural nucleotides of the polynucleotides of the invention. As a non-limiting example, the natural nucleotide uridine may be substituted with a modified nucleoside described herein. In another non-limiting example, the natural nucleotide uridine may be partially substituted (e.g., about 0.1%, 1%, 5%, 10%, 15%, 20%, 25%, 30%, 35%, 40%, 45%, 50%, 55%, 60%, 65%, 70%, 75%, 80%, 85%, 90%, 95% or 99.9%) with at least one of the modified nucleoside disclosed herein. Any combination of base/sugar or linker may be incorporated into the polynucleotides of the invention and such modifications are taught in International Application Number PCT/2012/058519 filed Oct. 3, 2012 (Attorney Docket Number M9) and in International Application Number PCT/US2013/075177 filed Dec. 13, 2013 (Attorney Docket Number M36) the contents of each of which are incorporated herein by reference in its entirety.

TABLE 8
Combinations

| Modified Nucleotide | Modified Nucleotide Combination |
|---|---|
| α-thio-cytidine | α-thio-cytidine/5-iodo-uridine |
| | α-thio-cytidine/N1-methyl-pseudouridine |
| | α-thio-cytidine/α-thio-uridine |
| | α-thio-cytidine/5-methyl-uridine |
| | α-thio-cytidine/pseudo-uridine |
| | about 50% of the cytosines are α-thio-cytidine |
| pseudoisocytidine | pseudoisocytidine/5-iodo-uridine |
| | pseudoisocytidine/N1-methyl-pseudouridine |
| | pseudoisocytidine/α-thio-uridine |
| | pseudoisocytidine/5-methyl-uridine |
| | pseudoisocytidine/pseudouridine |
| | about 25% of cytosines are pseudoisocytidine |
| | pseudoisocytidine/about 50% of uridines are N1- |
| | methyl-pseudouridine and about 50% of uridines are |
| | pseudouridine |
| | pseudoisocytidine/about 25% of uridines are N1- |
| | methyl-pseudouridine and about 25% of uridines are |
| | pseudouridine |
| pyrrolo-cytidine | pyrrolo-cytidine/5-iodo-uridine |
| | pyrrolo-cytidine/N1-methyl-pseudouridine |
| | pyrrolo-cytidine/α-thio-uridine |
| | pyrrolo-cytidine/5-methyl-uridine |
| | pyrrolo-cytidine/pseudouridine |
| | about 50% of the cytosines are pyrrolo-cytidine |
| 5-methyl-cytidine | 5-methyl-cytidine/5-iodo-uridine |
| | 5-methyl-cytidine/N1-methyl-pseudouridine |
| | 5-methyl-cytidine/α-thio-uridine |
| | 5-methyl-cytidine/5-methyl-uridine |
| | 5-methyl-cytidine/pseudouridine |
| | about 25% of cytosines are 5-methyl-cytidine |
| | about 50% of cytosines are 5-methyl-cytidine |
| | 5-methyl-cytidine/5-methoxy-uridine |
| | 5-methyl-cytidine/5-bromo-uridine |
| | 5-methyl-cytidine/2-thio-uridine |
| | 5-methyl-cytidine/about 50% of uridines are 2-thio- |
| | uridine |
| | about 50% of uridines are 5-methyl-cytidine/about |
| | 50% of uridines are 2-thio-uridine |
| N4-acetyl-cytidine | N4-acetyl-cytidine/5-iodo-uridine |
| | N4-acetyl-cytidine/N1-methyl-pseudouridine |
| | N4-acetyl-cytidine/α-thio-uridine |
| | N4-acetyl-cytidine/5-methyl-uridine |
| | N4-acetyl-cytidine/pseudouridine |
| | about 50% of cytosines are N4-acetyl-cytidine |
| | about 25% of cytosines are N4-acetyl-cytidine |
| | N4-acetyl-cytidine/5-methoxy-uridine |
| | N4-acetyl-cytidine/5-bromo-uridine |
| | N4-acetyl-cytidine/2-thio-uridine |
| | about 50% of cytosines are N4-acetyl-cytidine/about |
| | 50% of uridines are 2-thio-uridine |

### IV. PHARMACEUTICAL COMPOSITIONS

### Formulation, Administration, Delivery and Dosing

[0362] The present invention provides polynucleotides compositions and complexes in combination with one or more pharmaceutically acceptable excipients. Pharmaceutical compositions may optionally comprise one or more additional active substances, e.g. therapeutically and/or prophylactically active substances. Pharmaceutical compositions of the present invention may be sterile and/or pyrogen-free. General considerations in the formulation and/or manufacture of pharmaceutical agents may be found, for example, in Remington: The Science and Practice of Pharmacy 21^{st} ed., Lippincott Williams & Wilkins, 2005 (incorporated herein by reference in its entirety).

[0363] In some embodiments, compositions are administered to humans, human patients or subjects. For the purposes of the present disclosure, the phrase “active ingredient” generally refers to polynucleotides to be delivered as described herein.

[0364] Although the descriptions of pharmaceutical compositions provided herein are principally directed to pharmaceutical compositions which are suitable for administration to humans, it will be understood by the skilled artisan that such compositions are generally suitable for administration to any other animal, e.g., to non-human animals, e.g. non-human mammals. Modification of pharmaceutical compositions suitable for administration to humans in order to render the compositions suitable for administration to various animals is well understood, and the ordinarily skilled veterinary pharmacologist can design and/or perform such modification with merely ordinary, if any, experimentation. Subjects to which administration of the pharmaceutical compositions is contemplated include, but are not limited to, humans and/or other primates; mammals, including commercially relevant mammals such as cattle, pigs, horses, sheep, cats, dogs, mice, and/or rats; and/or birds, including commercially relevant birds such as poultry, chickens, ducks, geese, and/or turkeys.

[0365] Formulations of the pharmaceutical compositions described herein may be prepared by any method known or hereafter developed in the art of pharmacology. In general, such preparatory methods include the step of bringing the active ingredient into association with an excipient and/or one or more other accessory ingredients, and then, if necessary and/or desirable, dividing, shaping and/or packaging the product into a desired single- or multi-dose unit.

[0366] Relative amounts of the active ingredient, the pharmaceutically acceptable excipient, and/or any additional ingredients in a pharmaceutical composition in accordance with the invention will vary, depending upon the identity, size, and/or condition of the subject treated and further depending upon the route by which the composition is to be administered. By way of example, the composition may comprise between 0.1% and 100%, e.g., between 0.5 and 50%, between 1-30%, between 5-80%, at least 80% (w/w) active ingredient.

### Formulations

[0367] The polynucleotides of the invention can be formulated using one or more excipients to: (1) increase stability; (2) increase cell transfection; (3) permit the sustained or delayed release (e.g., from a depot formulation of the polynucleotide); (4) alter the biodistribution (e.g., target the polynucleotide to specific tissues or cell types); (5) increase the translation of encoded protein in vivo; and/or (6) alter the release profile of encoded protein in vivo. In addition to traditional excipients such as any and all solvents, dispersion media, diluents, or other liquid vehicles, dispersion or suspension aids, surface active agents, isotonic agents, thickening or emulsifying agents, preservatives, excipients of the present invention can include, without limitation, lipidoids, liposomes, lipid nanoparticles, polymers, lipoplexes, core-shell nanoparticles, peptides, proteins, cells transfected with polynucleotides (e.g., for transplantation into a subject), hyaluronidase, nanoparticle mimics and combinations thereof. Accordingly, the formulations of the invention can include one or more excipients, each in an amount that together increases the stability of the polynucleotide, increases cell transfection by the polynucleotide, increases the expression of polynucleotides encoded protein, and/or alters the release profile of polynucleotide encoded proteins. Further, the polynucleotides of the present invention may be formulated using self-assembled nucleic acid nanoparticles.

[0368] Formulations of the pharmaceutical compositions described herein may be prepared by any method known or hereafter developed in the art of pharmacology. In general, such preparatory methods include the step of associating the active ingredient with an excipient and/or one or more other accessory ingredients.

[0369] A pharmaceutical composition in accordance with the present disclosure may be prepared, packaged, and/or sold in bulk, as a single unit dose, and/or as a plurality of single unit doses. As used herein, a “unit dose” refers to a discrete amount of the pharmaceutical composition comprising a predetermined amount of the active ingredient. The amount of the active ingredient is generally equal to the dosage of the active ingredient which would be administered to a subject and/or a convenient fraction of such a dosage such as, for example, one-half or one-third of such a dosage.

[0370] Relative amounts of the active ingredient, the pharmaceutically acceptable excipient, and/or any additional ingredients in a pharmaceutical composition in accordance with the present disclosure may vary, depending upon the identity, size, and/or condition of the subject being treated and further depending upon the route by which the composition is to be administered. For example, the composition may comprise between 0.1% and 99% (w/w) of the active ingredient. By way of example, the composition may comprise between 0.1% and 100%, e.g., between 0.5 and 50%, between 1-30%, between 5-80%, at least 80% (w/w) active ingredient.

[0371] In some embodiments, the formulations described herein may contain at least one polynucleotide. As a non-limiting example, the formulations may contain 1, 2, 3, 4 or 5 polynucleotide.

[0372] In one embodiment, the formulations described herein may comprise more than one type of polynucleotide. In one embodiment, the formulation may comprise a chimeric polynucleotide in linear and circular form. In another embodiment, the formulation may comprise a circular polynucleotide and an IVT polynucleotide. In yet another embodiment, the formulation may comprise an IVT polynucleotide, a chimeric polynucleotide and a circular polynucleotide.

[0373] In one embodiment the formulation may contain polynucleotide encoding proteins selected from categories such as, but not limited to, human proteins, veterinary proteins, bacterial proteins, biological proteins, antibodies, immunogenic proteins, therapeutic peptides and proteins, secreted proteins, plasma membrane proteins, cytoplasmic and cytoskeletal proteins, intracellular membrane bound proteins, nuclear proteins, proteins associated with human disease and/or proteins associated with non-human diseases. In one embodiment, the formulation contains at least three polynucleotides encoding proteins. In one embodiment, the formulation contains at least five polynucleotide encoding proteins.

[0374] Pharmaceutical formulations may additionally comprise a pharmaceutically acceptable excipient, which, as used herein, includes, but is not limited to, any and all solvents, dispersion media, diluents, or other liquid vehicles, dispersion or suspension aids, surface active agents, isotonic agents, thickening or emulsifying agents, preservatives, and the like, as suited to the particular dosage form desired. Various excipients for formulating pharmaceutical compositions and techniques for preparing the composition are known in the art (see Remington: The Science and Practice of Pharmacy, 21^{st} Edition, A. R. Gennaro, Lippincott, Williams & Wilkins, Baltimore, Md., 2006; incorporated herein by reference in its entirety). The use of a conventional excipient medium may be contemplated within the scope of the present disclosure, except insofar as any conventional excipient medium may be incompatible with a substance or its derivatives, such as by producing any undesirable biological effect or otherwise interacting in a deleterious manner with any other component(s) of the pharmaceutical composition.

[0375] In some embodiments, the particle size of the lipid nanoparticle may be increased and/or decreased. The change in particle size may be able to help counter biological reaction such as, but not limited to, inflammation or may increase the biological effect of the polynucleotide delivered to mammals.

[0376] Pharmaceutically acceptable excipients used in the manufacture of pharmaceutical compositions include, but are not limited to, inert diluents, surface active agents and/or emulsifiers, preservatives, buffering agents, lubricating agents, and/or oils. Such excipients may optionally be included in the pharmaceutical formulations of the invention.

### Lipidoids

[0377] The synthesis of lipidoids has been extensively described and formulations containing these compounds are particularly suited for delivery of polynucleotides (see Mahon et al., Bioconjug Chem. 2010 21:1448-1454; Schroeder et al., J Intern Med. 2010 267:9-21; Akinc et al., Nat Biotechnol. 2008 26:561-569; Love et al., Proc Natl Acad Sci USA. 2010 107:1864-1869; Siegwart et al., Proc Natl Acad Sci USA. 2011 108:12996-3001; all of which are incorporated herein in their entireties).

[0378] While these lipidoids have been used to effectively deliver double stranded small interfering RNA molecules in rodents and non-human primates (see Akinc et al., Nat Biotechnol. 2008 26:561-569; Frank-Kamenetsky et al., Proc Natl Acad Sci USA. 2008 105:11915-11920; Akinc et al., Mol Ther. 2009 17:872-879; Love et al., Proc Natl Acad Sci USA. 2010 107:1864-1869; Leuschner et al., Nat Biotechnol. 2011 29:1005-1010; all of which is incorporated herein in their entirety), the present disclosure describes their formulation and use in delivering polynucleotides.

[0379] Complexes, micelles, liposomes or particles can be prepared containing these lipidoids and therefore, can result in an effective delivery of the polynucleotide, as judged by the production of an encoded protein, following the injection of a lipidoid formulation via localized and/or systemic routes of administration. Lipidoid complexes of polynucleotides can be administered by various means including, but not limited to, intravenous, intramuscular, or subcutaneous routes.

[0380] In vivo delivery of nucleic acids may be affected by many parameters, including, but not limited to, the formulation composition, nature of particle PEGylation, degree of loading, polynucleotide to lipid ratio, and biophysical parameters such as, but not limited to, particle size (Akinc et al., Mol Ther. 2009 17:872-879; herein incorporated by reference in its entirety). As an example, small changes in the anchor chain length of poly(ethylene glycol) (PEG) lipids may result in significant effects on in vivo efficacy. Formulations with the different lipidoids, including, but not limited to penta[3-(1-laurylaminopropionyl)]-triethylenetetramine hydrochloride (TETA-5LAP; aka 98N12-5, see Murugaiah et al., Analytical Biochemistry, 401:61 (2010); herein incorporated by reference in its entirety), C12-200 (including derivatives and variants), and MD1, can be tested for in vivo activity.

[0381] The lipidoid referred to herein as “98N12-5” is disclosed by Akinc et al., Mol Ther. 2009 17:872-879 and is incorporated by reference in its entirety.

[0382] The lipidoid referred to herein as “C12-200” is disclosed by Love et al., Proc Natl Acad Sci USA. 2010 107:1864-1869 and Liu and Huang, Molecular Therapy. 2010 669-670; both of which are herein incorporated by reference in their entirety. The lipidoid formulations can include particles comprising either 3 or 4 or more components in addition to polynucleotides.

[0383] Lipidoids and polynucleotide formulations comprising lipidoids are described in International Patent Application No. PCT/US2014/097077 (Attorney Docket No. M030.20), the contents of which are herein incorporated by reference in its entirety, such as in paragraphs [000415]-[000422].

### Liposomes, Lipoplexes, and Lipid Nanoparticles

[0384] The polynucleotides of the invention can be formulated using one or more liposomes, lipoplexes, or lipid nanoparticles. In one embodiment, pharmaceutical compositions of polynucleotides include liposomes. Liposomes are artificially-prepared vesicles which may primarily be composed of a lipid bilayer and may be used as a delivery vehicle for the administration of nutrients and pharmaceutical formulations. Liposomes can be of different sizes such as, but not limited to, a multilamellar vesicle (MLV) which may be hundreds of nanometers in diameter and may contain a series of concentric bilayers separated by narrow aqueous compartments, a small unicellular vesicle (SUV) which may be smaller than 50 nm in diameter, and a large unilamellar vesicle (LUV) which may be between 50 and 500 nm in diameter. Liposome design may include, but is not limited to, opsonins or ligands in order to improve the attachment of liposomes to unhealthy tissue or to activate events such as, but not limited to, endocytosis. Liposomes may contain a low or a high pH in order to improve the delivery of the pharmaceutical formulations.

[0385] The formation of liposomes may depend on the physicochemical characteristics such as, but not limited to, the pharmaceutical formulation entrapped and the liposomal ingredients, the nature of the medium in which the lipid vesicles are dispersed, the effective concentration of the entrapped substance and its potential toxicity, any additional processes involved during the application and/or delivery of the vesicles, the optimization size, polydispersity and the shelf-life of the vesicles for the intended application, and the batch-to-batch reproducibility and possibility of large-scale production of safe and efficient liposomal products.

[0386] As a non-limiting example, liposomes such as synthetic membrane vesicles may be prepared by the methods, apparatus and devices described in US Patent Publication No. US20130177638, US20130177637, US20130177636, US20130177635, US20130177634, US20130177633, US20130183375, US20130183373 and US20130183372, the contents of each of which are herein incorporated by reference in its entirety.

[0387] In one embodiment, pharmaceutical compositions described herein may include, without limitation, liposomes such as those formed from 1,2-dioleyloxy-N,N-dimethylaminopropane (DODMA) liposomes, DiLa2 liposomes from Marina Biotech (Bothell, Wash.), 1,2-dilinoleyloxy-3-dimethylaminopropane (DLin-DMA), 2,2-dilinoleyl-4-(2-dimethylaminoethyl)-[1,3]-dioxolane (DLin-KC2-DMA), and MC3 (US20100324120; herein incorporated by reference in its entirety) and liposomes which may deliver small molecule drugs such as, but not limited to, DOXIL® from Janssen Biotech, Inc. (Horsham, Pa.).

[0388] In one embodiment, pharmaceutical compositions described herein may include, without limitation, liposomes such as those formed from the synthesis of stabilized plasmid-lipid particles (SPLP) or stabilized nucleic acid lipid particle (SNALP) that have been previously described and shown to be suitable for oligonucleotide delivery in vitro and in vivo (see Wheeler et al. Gene Therapy. 1999 6:271-281; Zhang et al. Gene Therapy. 1999 6:1438-1447; Jeffs et al. Pharm Res. 2005 22:362-372; Morrissey et al., Nat Biotechnol. 2005 2:1002-1007; Zimmermann et al., Nature. 2006 441:111-114; Heyes et al. J Contr Rel. 2005 107:276-287; Semple et al. Nature Biotech. 2010 28:172-176; Judge et al. J Clin Invest. 2009 119:661-673; deFougerolles Hum Gene Ther. 2008 19:125-132; U.S. Patent Publication No US20130122104; all of which are incorporated herein in their entireties). The original manufacture method by Wheeler et al. was a detergent dialysis method, which was later improved by Jeffs et al. and is referred to as the spontaneous vesicle formation method. The liposome formulations are composed of 3 to 4 lipid components in addition to the polynucleotide. As an example a liposome can contain, but is not limited to, 55% cholesterol, 20% disteroylphosphatidyl choline (DSPC), 10% PEG-S-DSG, and 15% 1,2-dioleyloxy-N,N-dimethylaminopropane (DODMA), as described by Jeffs et al. As another example, certain liposome formulations may contain, but are not limited to, 48% cholesterol, 20% DSPC, 2% PEG-c-DMA, and 30% cationic lipid, where the cationic lipid can be 1,2-distearloxy-N,N-dimethylaminopropane (DSDMA), DODMA, DLin-DMA, or 1,2-dilinolenyloxy-3-dimethylaminopropane (DLenDMA), as described by Heyes et al.

[0389] In some embodiments, liposome formulations may comprise from about 25.0% cholesterol to about 40.0% cholesterol, from about 30.0% cholesterol to about 45.0% cholesterol, from about 35.0% cholesterol to about 50.0% cholesterol and/or from about 48.5% cholesterol to about 60% cholesterol. In a preferred embodiment, formulations may comprise a percentage of cholesterol selected from the group consisting of 28.5%, 31.5%, 33.5%, 36.5%, 37.0%, 38.5%, 39.0% and 43.5%. In some embodiments, formulations may comprise from about 5.0% to about 10.0% DSPC and/or from about 7.0% to about 15.0% DSPC.

[0390] In one embodiment, pharmaceutical compositions may include liposomes which may be formed to deliver polynucleotides which may encode at least one immunogen or any other polypeptide of interest. The polynucleotide may be encapsulated by the liposome and/or it may be contained in an aqueous core which may then be encapsulated by the liposome (see International Pub. Nos. WO2012031046, WO2012031043, WO2012030901 and WO2012006378 and US Patent Publication No. US20130189351, US20130195969 and US20130202684; the contents of each of which are herein incorporated by reference in their entirety).

[0391] In another embodiment, liposomes may be formulated for targeted delivery. As a non-limiting example, the liposome may be formulated for targeted delivery to the liver. The liposome used for targeted delivery may include, but is not limited to, the liposomes described in and methods of making liposomes described in US Patent Publication No. US20130195967, the contents of which are herein incorporated by reference in its entirety.

[0392] In another embodiment, the polynucleotide may be formulated in a cationic oil-in-water emulsion where the emulsion particle comprises an oil core and a cationic lipid which can interact with the polynucleotide anchoring the molecule to the emulsion particle (see International Pub. No. WO2012006380; herein incorporated by reference in its entirety).

[0393] In one embodiment, the polynucleotides may be formulated in a water-in-oil emulsion comprising a continuous hydrophobic phase in which the hydrophilic phase is dispersed. As a non-limiting example, the emulsion may be made by the methods described in International Publication No. WO201087791, herein incorporated by reference in its entirety.

[0394] In another embodiment, the lipid formulation may include at least cationic lipid, a lipid which may enhance transfection and a least one lipid which contains a hydrophilic head group linked to a lipid moiety (International Pub. No. WO2011076807 and U.S. Pub. No. 20110200582; the contents of each of which are herein incorporated by reference in their entirety). In another embodiment, the polynucleotides may be formulated in a lipid vesicle which may have crosslinks between functionalized lipid bilayers (see U.S. Pub. No. 20120177724, the contents of which are herein incorporated by reference in its entirety).

[0395] In one embodiment, the polynucleotides may be formulated in a liposome as described in International Patent Publication No. WO2013086526, herein incorporated by reference in its entirety. The polynucleotides may be encapsulated in a liposome using reverse pH gradients and/or optimized internal buffer compositions as described in International Patent Publication No. WO2013086526, herein incorporated by reference in its entirety.

[0396] In one embodiment, the pharmaceutical compositions may be formulated in liposomes such as, but not limited to, DiLa2 liposomes (Marina Biotech, Bothell, Wash.), SMARTICLES® (Marina Biotech, Bothell, Wash.), neutral DOPC (1,2-dioleoyl-sn-glycero-3-phosphocholine) based liposomes (e.g., siRNA delivery for ovarian cancer (Landen et al. Cancer Biology & Therapy 2006 5(12)1708-1713); herein incorporated by reference in its entirety) and hyaluronan-coated liposomes (Quiet Therapeutics, Israel).

[0397] In one embodiment, the cationic lipid may be a low molecular weight cationic lipid such as those described in US Patent Application No. 20130090372, the contents of which are herein incorporated by reference in its entirety.

[0398] In one embodiment, the polynucleotides may be formulated in a lipid vesicle which may have crosslinks between functionalized lipid bilayers.

[0399] In one embodiment, the polynucleotides may be formulated in a liposome comprising a cationic lipid. The liposome may have a molar ratio of nitrogen atoms in the cationic lipid to the phosphates in the RNA (N:P ratio) of between 1:1 and 20:1 as described in International Publication No. WO2013006825, herein incorporated by reference in its entirety. In another embodiment, the liposome may have a N:P ratio of greater than 20:1 or less than 1:1.

[0400] In one embodiment, the polynucleotides may be formulated in a lipid-polycation complex. The formation of the lipid-polycation complex may be accomplished by methods known in the art and/or as described in U.S. Pub. No. 20120178702, herein incorporated by reference in its entirety. As a non-limiting example, the polycation may include a cationic peptide or a polypeptide such as, but not limited to, polylysine, polyornithine and/or polyarginine and the cationic peptides described in International Pub. No. WO2012013326 or US Patent Pub. No. US20130142818; each of which is herein incorporated by reference in its entirety. In another embodiment, the polynucleotides may be formulated in a lipid-polycation complex which may further include a neutral lipid such as, but not limited to, cholesterol or dioleoyl phosphatidylethanolamine (DOPE).

[0401] In one embodiment, the polynucleotide may be formulated in an aminoalcohol lipidoid. Aminoalcohol lipidoids which may be used in the present invention may be prepared by the methods described in U.S. Pat. No. 8,450,298, herein incorporated by reference in its entirety.

[0402] The liposome formulation may be influenced by, but not limited to, the selection of the cationic lipid component, the degree of cationic lipid saturation, the nature of the PEGylation, ratio of all components and biophysical parameters such as size. In one example by Semple et al. (Semple et al. Nature Biotech. 2010 28:172-176; herein incorporated by reference in its entirety), the liposome formulation was composed of 57.1% cationic lipid, 7.1% dipalmitoylphosphatidylcholine, 34.3% cholesterol, and 1.4% PEG-c-DMA. As another example, changing the composition of the cationic lipid could more effectively deliver siRNA to various antigen presenting cells (Basha et al. Mol Ther. 2011 19:2186-2200; herein incorporated by reference in its entirety). In some embodiments, liposome formulations may comprise from about 35 to about 45% cationic lipid, from about 40% to about 50% cationic lipid, from about 50% to about 60% cationic lipid and/or from about 55% to about 65% cationic lipid. In some embodiments, the ratio of lipid to mRNA in liposomes may be from about 5:1 to about 20:1, from about 10:1 to about 25:1, from about 15:1 to about 30:1 and/or at least 30:1.

[0403] In some embodiments, the ratio of PEG in the lipid nanoparticle (LNP) formulations may be increased or decreased and/or the carbon chain length of the PEG lipid may be modified from C14 to C18 to alter the pharmacokinetics and/or biodistribution of the LNP formulations. As a non-limiting example, LNP formulations may contain from about 0.5% to about 3.0%, from about 1.0% to about 3.5%, from about 1.5% to about 4.0%, from about 2.0% to about 4.5%, from about 2.5% to about 5.0% and/or from about 3.0% to about 6.0% of the lipid molar ratio of PEG-c-DOMG as compared to the cationic lipid, DSPC and cholesterol. In another embodiment the PEG-c-DOMG may be replaced with a PEG lipid such as, but not limited to, PEG-DSG (1,2-Distearoyl-sn-glycerol, methoxypolyethylene glycol), PEG-DMG (1,2-Dimyristoyl-sn-glycerol) and/or PEG-DPG (1,2-Dipalmitoyl-sn-glycerol, methoxypolyethylene glycol). The cationic lipid may be selected from any lipid known in the art such as, but not limited to, DLin-MC3-DMA, DLin-DMA, C12-200 and DLin-KC2-DMA.

[0404] In one embodiment, the polynucleotides may be formulated in a lipid nanoparticle such as those described in International Publication No. WO2012170930, herein incorporated by reference in its entirety.

[0405] In one embodiment, the formulation comprising the polynucleotide is a nanoparticle which may comprise at least one lipid. The lipid may be selected from, but is not limited to, DLin-DMA, DLin-K-DMA, 98N12-5, C12-200, DLin-MC3-DMA, DLin-KC2-DMA, DODMA, PLGA, PEG, PEG-DMG, PEGylated lipids and amino alcohol lipids. In another aspect, the lipid may be a cationic lipid such as, but not limited to, DLin-DMA, DLin-D-DMA, DLin-MC3-DMA, DLin-KC2-DMA, DODMA and amino alcohol lipids. The amino alcohol cationic lipid may be the lipids described in and/or made by the methods described in US Patent Publication No. US20130150625, herein incorporated by reference in its entirety. As a non-limiting example, the cationic lipid may be 2-amino-3-[(9Z,12Z)-octadeca-9,12-dien-1-yloxy]-2-{[(9Z,2Z)-octadeca-9,12-dien-1-yloxy]methyl}propan-1-ol (Compound 1 in US20130150625); 2-amino-3-[(9Z)-octadec-9-en-1-yloxy]-2-{[(9Z)-octadec-9-en-1-yloxy]methyl}propan-1-ol (Compound 2 in US20130150625); 2-amino-3-[(9Z,12Z)-octadeca-9,12-dien-1-yloxy]-2-[(octyloxy)methyl]propan-1-ol (Compound 3 in US20130150625); and 2-(dimethylamino)-3-[(9Z,12Z)-octadeca-9,12-dien-1-yloxy]-2-{[(9Z,12Z)-octadeca-9,12-dien-1-yloxy]methyl}propan-1-ol (Compound 4 in US20130150625); or any pharmaceutically acceptable salt or stereoisomer thereof.

[0406] In one embodiment, the cationic lipid may be selected from, but not limited to, a cationic lipid described in International Publication Nos. WO2012040184, WO2011153120, WO2011149733, WO2011090965, WO2011043913, WO2011022460, WO2012061259, WO2012054365, WO2012044638, WO2010080724, WO201021865, WO2008103276, WO2013086373 and WO2013086354, U.S. Pat. Nos. 7,893,302, 7,404,969, 8,283,333, and 8,466,122 and US Patent Publication No. US20100036115, US20120202871, US20130064894, US20130129785, US20130150625, US20130178541 and US20130225836; the contents of each of which are herein incorporated by reference in their entirety. In another embodiment, the cationic lipid may be selected from, but not limited to, formula A described in International Publication Nos. WO2012040184, WO2011153120, WO2011149733, WO2011090965, WO2011043913, WO2011022460, WO2012061259, WO2012054365, WO2012044638 and WO2013116126 or US Patent Publication No. US20130178541 and US20130225836; the contents of each of which is herein incorporated by reference in their entirety. In yet another embodiment, the cationic lipid may be selected from, but not limited to, formula CLI-CLXXIX of International Publication No. WO2008103276, formula CLI-CLXXIX of U.S. Pat. No. 7,893,302, formula CLI-CLXXXXII of U.S. Pat. No. 7,404,969 and formula I-VI of US Patent Publication No. US20100036115, formula I of US Patent Publication No US20130123338; each of which is herein incorporated by reference in their entirety. As a non-limiting example, the cationic lipid may be selected from (20Z,23Z)—N,N-dimethylnonacosa-20,23-dien-10-amine, (17Z,20Z)—N,N-dimemylhexacosa-17,20-dien-9-amine, (1Z,19Z)—N5N-dimethylpentacosa-16, 19-dien-8-amine, (13Z,16Z)—N,N-dimethyldocosa-13,16-dien-5-amine, (12Z,15Z)—N,N-dimethylhenicosa-12,15-dien-4-amine, (14Z,17Z)—N,N-dimethyltricosa-14,17-dien-6-amine, (15Z,18Z)—N,N-dimethyltetracosa-15,18-dien-7-amine, (18Z,21Z)—N,N-dimethylheptacosa-18,21-dien-10-amine, (15Z,18Z)—N,N-dimethyltetracosa-15,18-dien-5-amine, (14Z,17Z)—N,N-dimethyltricosa-14,17-dien-4-amine, (19Z,22Z)—N,N-dimeihyloctacosa-19,22-dien-9-amine, (18Z,21Z)—N,N-dimethylheptacosa-18,21-dien-8-amine, (17Z,20Z)—N,N-dimethylhexacosa-17,20-dien-7-amine, (16Z,19Z)—N,N-dimethylpentacosa-16,19-dien-6-amine, (22Z,25Z)—N,N-dimethylhentriaconta-22,25-dien-10-amine, (21Z,24Z)—N,N-dimethyltriaconta-21,24-dien-9-amine, (18Z)—N,N-dimetylheptacos-18-en-10-amine, (17Z)—N,N-dimethylhexacos-17-en-9-amine, (19Z,22Z)—N,N-dimethyloctacosa-19,22-dien-7-amine, N,N-dimethylheptacosan-10-amine, (20Z,23Z)—N-ethyl-N-methylnonacosa-20,23-dien-10-amine, 1-[(11Z,14Z)-1-nonylicosa-11,14-dien-1-yl]pyrrolidine, (20Z)—N,N-dimethylheptacos-20-en-10-amine, (15Z)—N,N-dimethyl eptacos-15-en-10-amine, (14Z)—N,N-dimethylnonacos-14-en-10-amine, (17Z)—N,N-dimethylnonacos-17-en-10-amine, (24Z)—N,N-dimethyltritriacont-24-en-10-amine, (20Z)—N,N-dimethylnonacos-20-en-10-amine, (22Z)—N,N-dimethylhentriacont-22-en-10-amine, (16Z)—N,N-dimethylpentacos-16-en-8-amine, (12Z,15Z)—N,N-dimethyl-2-nonylhenicosa-12,15-dien-1-amine, (13Z,16Z)—N,N-dimethyl-3-nonyldocosa-13,16-dien-1-amine, N,N-dimethyl-1-[(1S,2R)-2-octylcyclopropyl] eptadecan-8-amine, 1-[(1S,2R)-2-hexylcyclopropyl]-N,N-dimethylnonadecan-10-amine, N,N-dimethyl-1-[(1S,2R)-2-octylcyclopropyl]nonadecan-10-amine, N,N-dimethyl-21-[(1S,2R)-2-octylcyclopropyl]henicosan-10-amine,N,N-dimethyl-1-[(1S,2S)-2-{[(1R,2R)-2-pentylcycIopropyl]methyl}cyclopropyl]nonadecan-10-amine,N,N-dimethyl-1-[(1S,2R)-2-octylcyclopropyl]hexadecan-8-amine, N,N-dimethyl-[(1R,2S)-2-undecyIcyclopropyl]tetradecan-5-amine, N,N-dimethyl-3-{7-[(1S,2R)-2-octylcyclopropyl]heptyl}dodecan-1-amine, 1-[(1R,2S)-2-heptylcyclopropyl]-N,N-dimethyloctadecan-9-amine, 1-[(1 S,2R)-2-decylcyclopropyl]-N,N-dimethylpentadecan-6-amine, N,N-dimethyl-1-[(1S,2R)-2-octylcyclopropyl]pentadecan-8-amine, R—N,N-dimethyl-1-[(9Z,12Z)-octadeca-9,12-dien-1-yloxy]-3-(octyloxy)propan-2-amine, S—N,N-dimethyl-1-[(9Z,12Z)-octadeca-9,12-dien-1-yloxy]-3-(octyloxy)propan-2-amine, 1-{2-[(9Z,12Z)-octadeca-9,12-dien-1-yloxy]-1-[(octyloxy)methyl]ethyl}pyrrolidine, (2 S)—N,N-dimethyl-1-[(9Z,12Z)-octadeca-9,12-dien-1-yloxy]-3-[(5Z)-oct-5-en-1-yloxy]propan-2-amine, 1-{2-[(9Z,12Z)-octadeca-9,12-dien-1-yloxy]-1-[(octyloxy)methyl]ethyl}azetidine, (2 S)-1-(hexyloxy)-N,N-dimethyl-3-[(9Z,12Z)-octadeca-9,12-dien-1-yloxy]propan-2-amine, (2 S)-1-(heptyloxy)-N,N-dimethyl-3-[(9Z,12Z)-octadeca-9,12-dien-1-yloxy]propan-2-amine, N,N-dimethyl-1-(nonyloxy)-3-[(9Z,12Z)-octadeca-9,12-dien-1-yloxy]propan-2-amine, N,N-dimethyl-1-[(9Z)-octadec-9-en-1-yloxy]-3-(octyloxy)propan-2-amine; (2S)—N,N-dimethyl-1-[(6Z,9Z,12Z)-octadeca-6,9,12-trien-1-yloxy]-3-(octyloxy)propan-2-amine, (2S)-1-[(11Z,14Z)-icosa-11,14-dien-1-yloxy]-N,N-dimethyl-3-(pentyloxy)propan-2-amine, (2 S)-1-(hexyloxy)-3-[(11Z,14Z)-icosa-11,14-dien-1-yloxy]-N,N-dimethylpropan-2-amine, 1-[(11Z,14Z)-icosa-11,14-dien-1-yloxy]-N,N-dimethyl-3-(octyloxy)propan-2-amine, 1-[(13Z,16Z)-docosa-13,16-dien-1-yloxy]-N,N-dimethyl-3-(octyloxy)propan-2-amine, (2 S)-1-[(13Z,16Z)-docosa-13,16-dien-1-yloxy]-3-(hexyloxy)-N,N-dimethylpropan-2-amine, (2S)-1-[(13Z)-docos-13-en-1-yloxy]-3-(hexyloxy)-N,N-dimethylpropan-2-amine, 1-[(13Z)-docos-13-en-1-yloxy]-N,N-dimethyl-3-(octyloxy)propan-2-amine, 1-[(9Z)-hexadec-9-en-1-yloxy]-N,N-dimethyl-3-(octyloxy)propan-2-amine, (2R)—N,N-dimethyl-H(1-metoyloctyl)oxy]-3-[(9Z,12Z)-octadeca-9,12-dien-1-yloxy]propan-2-amine, (2R)-1-[(3,7-dimethyloctyl)oxy]-N,N-dimethyl-3-[(9Z,12Z)-octadeca-9,12-dien-1-yloxy]propan-2-amine, N,N-dimethyl-1-(octyloxy)-3-({8-[(1 S,2S)-2-{[(1R,2R)-2-pentylcyclopropyl]methyl}cyclopropyl]octyl}oxy)propan-2-amine, N,N-dimethyl-1-{[8-(2-oclylcyclopropyl)octyl]oxy}-3-(octyloxy)propan-2-amine and (11E,20Z,23Z)—N,N-dimethylnonacosa-11,20,2-trien-10-amine or a pharmaceutically acceptable salt or stereoisomer thereof.

[0407] In one embodiment, the lipid may be a cleavable lipid such as those described in International Publication No. WO2012170889, herein incorporated by reference in its entirety.

[0408] In another embodiment, the lipid may be a cationic lipid such as, but not limited to, Formula (I) of U.S. Patent Application No. US20130064894, the contents of which are herein incorporated by reference in its entirety.

[0409] In one embodiment, the cationic lipid may be synthesized by methods known in the art and/or as described in International Publication Nos. WO2012040184, WO2011153120, WO2011149733, WO2011090965, WO2011043913, WO2011022460, WO2012061259, WO2012054365, WO2012044638, WO2010080724, WO201021865, WO2013086373 and WO2013086354; the contents of each of which are herein incorporated by reference in their entirety.

[0410] In another embodiment, the cationic lipid may be a trialkyl cationic lipid. Non-limiting examples of trialkyl cationic lipids and methods of making and using the trialkyl cationic lipids are described in International Patent Publication No. WO2013126803, the contents of which are herein incorporated by reference in its entirety.

[0411] In one embodiment, the LNP formulations of the polynucleotides may contain PEG-c-DOMG at 3% lipid molar ratio. In another embodiment, the LNP formulations polynucleotides may contain PEG-c-DOMG at 1.5% lipid molar ratio.

[0412] In one embodiment, the pharmaceutical compositions of the polynucleotides may include at least one of the PEGylated lipids described in International Publication No. WO2012099755, herein incorporated by reference.

[0413] In one embodiment, the LNP formulation may contain PEG-DMG 2000 (1,2-dimyristoyl-sn-glycero-3-phophoethanolamine-N-[methoxy(polyethylene glycol)-2000). In one embodiment, the LNP formulation may contain PEG-DMG 2000, a cationic lipid known in the art and at least one other component. In another embodiment, the LNP formulation may contain PEG-DMG 2000, a cationic lipid known in the art, DSPC and cholesterol. As a non-limiting example, the LNP formulation may contain PEG-DMG 2000, DLin-DMA, DSPC and cholesterol. As another non-limiting example the LNP formulation may contain PEG-DMG 2000, DLin-DMA, DSPC and cholesterol in a molar ratio of 2:40:10:48 (see e.g., Geall et al., Nonviral delivery of self-amplifying RNA vaccines, PNAS 2012; PMID: 22908294; herein incorporated by reference in its entirety).

[0414] In one embodiment, the LNP formulation may be formulated by the methods described in International Publication Nos. WO2011127255 or WO2008103276, the contents of each of which is herein incorporated by reference in their entirety. As a non-limiting example, the polynucleotides described herein may be encapsulated in LNP formulations as described in WO2011127255 and/or WO2008103276; each of which is herein incorporated by reference in their entirety.

[0415] In one embodiment, the polynucleotides described herein may be formulated in a nanoparticle to be delivered by a parenteral route as described in U.S. Pub. No. US20120207845; the contents of which are herein incorporated by reference in its entirety.

[0416] In one embodiment, the polynucleotides may be formulated in a lipid nanoparticle made by the methods described in US Patent Publication No US20130156845 or International Publication No WO2013093648 or WO2012024526, each of which is herein incorporated by reference in its entirety.

[0417] The lipid nanoparticles described herein may be made in a sterile environment by the system and/or methods described in US Patent Publication No. US20130164400, herein incorporated by reference in its entirety.

[0418] In one embodiment, the LNP formulation may be formulated in a nanoparticle such as a nucleic acid-lipid particle described in U.S. Pat. No. 8,492,359, the contents of which are herein incorporated by reference in its entirety. As a non-limiting example, the lipid particle may comprise one or more active agents or therapeutic agents; one or more cationic lipids comprising from about 50 mol % to about 85 mol % of the total lipid present in the particle; one or more non-cationic lipids comprising from about 13 mol % to about 49.5 mol % of the total lipid present in the particle; and one or more conjugated lipids that inhibit aggregation of particles comprising from about 0.5 mol % to about 2 mol % of the total lipid present in the particle. The nucleic acid in the nanoparticle may be the polynucleotides described herein and/or are known in the art.

[0419] In one embodiment, the LNP formulation may be formulated by the methods described in International Publication Nos. WO2011127255 or WO2008103276, the contents of each of which are herein incorporated by reference in their entirety. As a non-limiting example, modified RNA described herein may be encapsulated in LNP formulations as described in WO2011127255 and/or WO2008103276; the contents of each of which are herein incorporated by reference in their entirety.

[0420] In one embodiment, LNP formulations described herein may comprise a polycationic composition. As a non-limiting example, the polycationic composition may be selected from formula 1-60 of US Patent Publication No. US20050222064; the content of which is herein incorporated by reference in its entirety. In another embodiment, the LNP formulations comprising a polycationic composition may be used for the delivery of the modified RNA described herein in vivo and/or in vitro.

[0421] In one embodiment, the LNP formulations described herein may additionally comprise a permeability enhancer molecule. Non-limiting permeability enhancer molecules are described in US Patent Publication No. US20050222064; the content of which is herein incorporated by reference in its entirety.

[0422] In one embodiment, the pharmaceutical compositions may be formulated in liposomes such as, but not limited to, DiLa2 liposomes (Marina Biotech, Bothell, Wash.), SMARTICLES® (Marina Biotech, Bothell, Wash.), neutral DOPC (1,2-dioleoyl-sn-glycero-3-phosphocholine) based liposomes (e.g., siRNA delivery for ovarian cancer (Landen et al. Cancer Biology & Therapy 2006 5(12)1708-1713); herein incorporated by reference in its entirety) and hyaluronan-coated liposomes (Quiet Therapeutics, Israel).

[0423] In one embodiment, the polynucleotides may be formulated in a lyophilized gel-phase liposomal composition as described in US Publication No. US2012060293, herein incorporated by reference in its entirety.

[0424] The nanoparticle formulations may be a carbohydrate nanoparticle comprising a carbohydrate carrier and a polynucleotide. As a non-limiting example, the carbohydrate carrier may include, but is not limited to, an anhydride-modified phytoglycogen or glycogen-type material, phtoglycogen octenyl succinate, phytoglycogen beta-dextrin, anhydride-modified phytoglycogen beta-dextrin. (See e.g., International Publication No. WO2012109121; the contents of which are herein incorporated by reference in its entirety).

[0425] Nanoparticle formulations of the present invention may be coated with a surfactant or polymer in order to improve the delivery of the particle. In one embodiment, the nanoparticle may be coated with a hydrophilic coating such as, but not limited to, PEG coatings and/or coatings that have a neutral surface charge. The hydrophilic coatings may help to deliver nanoparticles with larger payloads such as, but not limited to, polynucleotides within the central nervous system. As a non-limiting example nanoparticles comprising a hydrophilic coating and methods of making such nanoparticles are described in US Patent Publication No. US20130183244, the contents of which are herein incorporated by reference in its entirety.

[0426] In one embodiment, the lipid nanoparticles of the present invention may be hydrophilic polymer particles. Non-limiting examples of hydrophilic polymer particles and methods of making hydrophilic polymer particles are described in US Patent Publication No. US20130210991, the contents of which are herein incorporated by reference in its entirety.

[0427] In another embodiment, the lipid nanoparticles of the present invention may be hydrophobic polymer particles.

[0428] Lipid nanoparticle formulations may be improved by replacing the cationic lipid with a biodegradable cationic lipid which is known as a rapidly eliminated lipid nanoparticle (reLNP). Ionizable cationic lipids, such as, but not limited to, DLinDMA, DLin-KC2-DMA, and DLin-MC3-DMA, have been shown to accumulate in plasma and tissues over time and may be a potential source of toxicity. The rapid metabolism of the rapidly eliminated lipids can improve the tolerability and therapeutic index of the lipid nanoparticles by an order of magnitude from a 1 mg/kg dose to a 10 mg/kg dose in rat. Inclusion of an enzymatically degraded ester linkage can improve the degradation and metabolism profile of the cationic component, while still maintaining the activity of the reLNP formulation. The ester linkage can be internally located within the lipid chain or it may be terminally located at the terminal end of the lipid chain. The internal ester linkage may replace any carbon in the lipid chain.

[0429] In one embodiment, the internal ester linkage may be located on either side of the saturated carbon.

[0430] In one embodiment, an immune response may be elicited by delivering a lipid nanoparticle which may include a nanospecies, a polymer and an immunogen. (U.S. Publication No. 20120189700 and International Publication No. WO2012099805; each of which is herein incorporated by reference in their entirety). The polymer may encapsulate the nanospecies or partially encapsulate the nanospecies. The immunogen may be a recombinant protein, a modified RNA and/or a polynucleotide described herein. In one embodiment, the lipid nanoparticle may be formulated for use in a vaccine such as, but not limited to, against a pathogen.

[0431] Lipid nanoparticles may be engineered to alter the surface properties of particles so the lipid nanoparticles may penetrate the mucosal barrier. Lipid nanoparticles to penetrate the mucosal barrier and areas where mucus is located is described in International Patent Application No. PCT/US2014/027077 (Attorney Docket No. M030.20), the contents of which are herein incorporated by reference in its entirety, for example in paragraphs [000491]-[000501].

[0432] In one embodiment, the polynucleotide is formulated as a lipoplex, such as, without limitation, the ATUPLEX™ system, the DACC system, the DBTC system and other siRNA-lipoplex technology from Silence Therapeutics (London, United Kingdom), STEMFECT™ from STEMGENT® (Cambridge, Mass.), and polyethylenimine (PEI) or protamine-based targeted and non-targeted delivery of nucleic acids acids (Aleku et al. Cancer Res. 2008 68:9788-9798; Strumberg et al. Int J Clin Pharmacol Ther 2012 50:76-78; Santel et al., Gene Ther 2006 13:1222-1234; Santel et al., Gene Ther 2006 13:1360-1370; Gutbier et al., Pulm Pharmacol. Ther. 2010 23:334-344; Kaufmann et al. Microvasc Res 2010 80:286-293Weide et al. J Immunother. 2009 32:498-507; Weide et al. J Immunother. 2008 31:180-188; Pascolo Expert Opin. Biol. Ther. 4:1285-1294; Fotin-Mleczek et al., 2011 J. Immunother. 34:1-15; Song et al., Nature Biotechnol. 2005, 23:709-717; Peer et al., Proc Natl Acad Sci USA. 2007 6; 104:4095-4100; deFougerolles Hum Gene Ther. 2008 19:125-132; all of which are incorporated herein by reference in its entirety).

[0433] In one embodiment such formulations may also be constructed or compositions altered such that they passively or actively are directed to different cell types in vivo, including but not limited to hepatocytes, immune cells, tumor cells, endothelial cells, antigen presenting cells, and leukocytes (Akinc et al. Mol Ther. 2010 18:1357-1364; Song et al., Nat Biotechnol. 2005 23:709-717; Judge et al., J Clin Invest. 2009 119:661-673; Kaufmann et al., Microvasc Res 2010 80:286-293; Santel et al., Gene Ther 2006 13:1222-1234; Santel et al., Gene Ther 2006 13:1360-1370; Gutbier et al., Pulm Pharmacol. Ther. 2010 23:334-344; Basha et al., Mol. Ther. 2011 19:2186-2200; Fenske and Cullis, Expert Opin Drug Deliv. 2008 5:25-44; Peer et al., Science. 2008 319:627-630; Peer and Lieberman, Gene Ther. 2011 18:1127-1133; all of which are incorporated herein by reference in its entirety). One example of passive targeting of formulations to liver cells includes the DLin-DMA, DLin-KC2-DMA and DLin-MC3-DMA-based lipid nanoparticle formulations which have been shown to bind to apolipoprotein E and promote binding and uptake of these formulations into hepatocytes in vivo (Akinc et al. Mol Ther. 2010 18:1357-1364; herein incorporated by reference in its entirety). Formulations can also be selectively targeted through expression of different ligands on their surface as exemplified by, but not limited by, folate, transferrin, N-acetylgalactosamine (GalNAc), and antibody targeted approaches (Kolhatkar et al., Curr Drug Discov Technol. 2011 8:197-206; Musacchio and Torchilin, Front Biosci. 2011 16:1388-1412; Yu et al., Mol Membr Biol. 2010 27:286-298; Patil et al., Crit Rev Ther Drug Carrier Syst. 2008 25:1-61; Benoit et al., Biomacromolecules. 2011 12:2708-2714; Zhao et al., Expert Opin Drug Deliv. 2008 5:309-319; Akinc et al., Mol Ther. 2010 18:1357-1364; Srinivasan et al., Methods Mol Biol. 2012 820:105-116; Ben-Arie et al., Methods Mol Biol. 2012 757:497-507; Peer 2010 J Control Release. 20:63-68; Peer et al., Proc Natl Acad Sci USA. 2007 104:4095-4100; Kim et al., Methods Mol Biol. 2011 721:339-353; Subramanya et al., Mol Ther. 2010 18:2028-2037; Song et al., Nat Biotechnol. 2005 23:709-717; Peer et al., Science. 2008 319:627-630; Peer and Lieberman, Gene Ther. 2011 18:1127-1133; all of which are incorporated herein by reference in its entirety).

[0434] In one embodiment, the polynucleotide is formulated as a solid lipid nanoparticle. A solid lipid nanoparticle (SLN) may be spherical with an average diameter between 10 to 1000 nm. SLN possess a solid lipid core matrix that can solubilize lipophilic molecules and may be stabilized with surfactants and/or emulsifiers. In a further embodiment, the lipid nanoparticle may be a self-assembly lipid-polymer nanoparticle (see Zhang et al., ACS Nano, 2008, 2 (8), pp 1696-1702; the contents of which are herein incorporated by reference in its entirety). As a non-limiting example, the SLN may be the SLN described in International Patent Publication No. WO2013105101, the contents of which are herein incorporated by reference in its entirety. As another non-limiting example, the SLN may be made by the methods or processes described in International Patent Publication No. WO2013105101, the contents of which are herein incorporated by reference in its entirety.

[0435] Liposomes, lipoplexes, or lipid nanoparticles may be used to improve the efficacy of polynucleotides directed protein production as these formulations may be able to increase cell transfection by the polynucleotide; and/or increase the translation of encoded protein. One such example involves the use of lipid encapsulation to enable the effective systemic delivery of polyplex plasmid DNA (Heyes et al., Mol Ther. 2007 15:713-720; herein incorporated by reference in its entirety). The liposomes, lipoplexes, or lipid nanoparticles may also be used to increase the stability of the polynucleotide.

[0436] In one embodiment, the polynucleotides of the present invention can be formulated for controlled release and/or targeted delivery. As used herein, “controlled release” refers to a pharmaceutical composition or compound release profile that conforms to a particular pattern of release to effect a therapeutic outcome. In one embodiment, the polynucleotides may be encapsulated into a delivery agent described herein and/or known in the art for controlled release and/or targeted delivery. As used herein, the term “encapsulate” means to enclose, surround or encase. As it relates to the formulation of the compounds of the invention, encapsulation may be substantial, complete or partial. The term “substantially encapsulated” means that at least greater than 50, 60, 70, 80, 85, 90, 95, 96, 97, 98, 99, 99.9, 99.9 or greater than 99.999% of the pharmaceutical composition or compound of the invention may be enclosed, surrounded or encased within the delivery agent. “Partially encapsulation” means that less than 10, 10, 20, 30, 40 50 or less of the pharmaceutical composition or compound of the invention may be enclosed, surrounded or encased within the delivery agent. Advantageously, encapsulation may be determined by measuring the escape or the activity of the pharmaceutical composition or compound of the invention using fluorescence and/or electron micrograph. For example, at least 1, 5, 10, 20, 30, 40, 50, 60, 70, 80, 85, 90, 95, 96, 97, 98, 99, 99.9, 99.99 or greater than 99.99% of the pharmaceutical composition or compound of the invention are encapsulated in the delivery agent.

[0437] In one embodiment, the controlled release formulation may include, but is not limited to, tri-block co-polymers. As a non-limiting example, the formulation may include two different types of tri-block co-polymers (International Pub. No. WO2012131104 and WO2012131106; each of which is herein incorporated by reference in its entirety).

[0438] In another embodiment, the polynucleotides may be encapsulated into a lipid nanoparticle or a rapidly eliminated lipid nanoparticle and the lipid nanoparticles or a rapidly eliminated lipid nanoparticle may then be encapsulated into a polymer, hydrogel and/or surgical sealant described herein and/or known in the art. As a non-limiting example, the polymer, hydrogel or surgical sealant may be PLGA, ethylene vinyl acetate (EVAc), poloxamer, GELSITE® (Nanotherapeutics, Inc. Alachua, Fla.), HYLENEX® (Halozyme Therapeutics, San Diego Calif.), surgical sealants such as fibrinogen polymers (Ethicon Inc. Cornelia, Ga.), TISSELL® (Baxter International, Inc Deerfield, Ill.), PEG-based sealants, and COSEAL® (Baxter International, Inc Deerfield, Ill.).

[0439] In another embodiment, the lipid nanoparticle may be encapsulated into any polymer known in the art which may form a gel when injected into a subject. As another non-limiting example, the lipid nanoparticle may be encapsulated into a polymer matrix which may be biodegradable.

[0440] In one embodiment, the polynucleotide formulation for controlled release and/or targeted delivery may also include at least one controlled release coating. Controlled release coatings include, but are not limited to, OPADRY®, polyvinylpyrrolidone/vinyl acetate copolymer, polyvinylpyrrolidone, hydroxypropyl methylcellulose, hydroxypropyl cellulose, hydroxyethyl cellulose, EUDRAGIT RL®, EUDRAGIT RS® and cellulose derivatives such as ethylcellulose aqueous dispersions (AQUACOAT® and SURELEASE®). Controlled release and/or targeted delivery formulations are described in International Patent Application No. PCT/US2014/027077, the contents of which are herein incorporated by reference in its entirety, and non-limiting examples of the formulations are in paragraphs [000515]-[000519].

[0441] In one embodiment, the polynucleotides of the present invention may be encapsulated in a therapeutic nanoparticle including ACCURINS™. Therapeutic nanoparticles may be formulated by methods described herein and known in the art such as, but not limited to, in International Patent Application No. PCT/US2014/027077 (Attorney Docket No. M030.20), the contents of which are herein incorporated by reference in its entirety, such as in paragraphs [000519]-[000551]. As one example, the therapeutic nanoparticle may be a sustained release nanoparticle such as those described in International Patent Application No. PCT/US2014/027077 (Attorney Docket No. M030.20), the contents of which are herein incorporated by reference in its entirety, such as in paragraphs [000531]-[000533].

[0442] In one embodiment, the nanoparticles of the present invention may comprise a polymeric matrix. As a non-limiting example, the nanoparticle may comprise two or more polymers such as, but not limited to, polyethylenes, polycarbonates, polyanhydrides, polyhydroxyacids, polypropylfumerates, polycaprolactones, polyamides, polyacetals, polyethers, polyesters, poly(orthoesters), polycyanoacrylates, polyvinyl alcohols, polyurethanes, polyphosphazenes, polyacrylates, polymethacrylates, polycyanoacrylates, polyureas, polystyrenes, polyamines, polylysine, poly(ethylene imine), poly(serine ester), poly(L-lactide-co-L-lysine), poly(4-hydroxy-L-proline ester) or combinations thereof.

[0443] In one embodiment, the therapeutic nanoparticle comprises a diblock copolymer. In one embodiment, the diblock copolymer may include PEG in combination with a polymer such as, but not limited to, polyethylenes, polycarbonates, polyanhydrides, polyhydroxyacids, polypropylfumerates, polycaprolactones, polyamides, polyacetals, polyethers, polyesters, poly(orthoesters), polycyanoacrylates, polyvinyl alcohols, polyurethanes, polyphosphazenes, polyacrylates, polymethacrylates, polycyanoacrylates, polyureas, polystyrenes, polyamines, polylysine, poly(ethylene imine), poly(serine ester), poly(L-lactide-co-L-lysine), poly(4-hydroxy-L-proline ester) or combinations thereof. In another embodiment, the diblock copolymer may comprise the diblock copolymers described in European Patent Publication No. the contents of which are herein incorporated by reference in its entirety. In yet another embodiment, the diblock copolymer may be a high-X diblock copolymer such as those described in International Patent Publication No. WO2013120052, the contents of which are herein incorporated by reference in its entirety.

[0444] In yet another non-limiting example, the lipid nanoparticle comprises the block copolymer PEG-PLGA-PEG (see e.g., the thermosensitive hydrogel (PEG-PLGA-PEG) was used as a TGF-beta1 gene delivery vehicle in Lee et al. Thermosensitive Hydrogel as a Tgf-β1 Gene Delivery Vehicle Enhances Diabetic Wound Healing. Pharmaceutical Research, 2003 20(12): 1995-2000; as a controlled gene delivery system in Li et al. Controlled Gene Delivery System Based on Thermosensitive Biodegradable Hydrogel. Pharmaceutical Research 2003 20(6):884-888; and Chang et al., Non-ionic amphiphilic biodegradable PEG-PLGA-PEG copolymer enhances gene delivery efficiency in rat skeletal muscle. J Controlled Release. 2007 118:245-253; each of which is herein incorporated by reference in its entirety). The polynucleotides of the present invention may be formulated in lipid nanoparticles comprising the PEG-PLGA-PEG block copolymer.

[0445] In one embodiment, the polynucleotides of the present invention may be encapsulated in a synthetic nanocarrier. Synthetic nanocarriers may be formulated by methods described herein and known in the art such as, but not limited to, in International Patent Application No. PCT/US2014/027077 (Attorney Docket No. M030.20), the contents of which are herein incorporated by reference in its entirety, such as in paragraphs [000552]-[000563].

[0446] In one embodiment, the polynucleotides may be encapsulated in, linked to and/or associated with zwitterionic lipids. Non-limiting examples of zwitterionic lipids and methods of using zwitterionic lipids are described in US Patent Publication No. US20130216607, the contents of which are herein incorporated by reference in its entirety. In one aspect, the zwitterionic lipids may be used in the liposomes and lipid nanoparticles described herein.

[0447] In one embodiment, the polynucleotides may be formulated in colloid nanocarriers as described in US Patent Publication No. US20130197100, the contents of which are herein incorporated by reference in its entirety.

[0448] In one embodiment, the nanoparticle may be optimized for oral administration. The nanoparticle may comprise at least one cationic biopolymer such as, but not limited to, chitosan or a derivative thereof. As a non-limiting example, the nanoparticle may be formulated by the methods described in U.S. Pub. No. 20120282343; herein incorporated by reference in its entirety.

[0449] In some embodiments, LNPs comprise the lipid KL52 (an amino-lipid disclosed in U.S. Application Publication No. 2012/0295832 expressly incorporated herein by reference in its entirety). Activity and/or safety (as measured by examining one or more of ALT/AST, white blood cell count and cytokine induction) of LNP administration may be improved by incorporation of such lipids. LNPs comprising KL52 may be administered intravenously and/or in one or more doses. In some embodiments, administration of LNPs comprising KL52 results in equal or improved mRNA and/or protein expression as compared to LNPs comprising MC3.

[0450] In some embodiments, polynucleotides may be delivered using smaller LNPs. Such particles may comprise a diameter from below 0.1 um up to 100 nm such as, but not limited to, less than 0.1 um, less than 1.0 um, less than 5 um, less than 10 um, less than 15 um, less than 20 um, less than 25 um, less than 30 um, less than 35 um, less than 40 um, less than 50 um, less than 55 um, less than 60 um, less than 65 um, less than 70 um, less than 75 um, less than 80 um, less than 85 um, less than 90 um, less than 95 um, less than 100 um, less than 125 um, less than 150 um, less than 175 um, less than 200 um, less than 225 um, less than 250 um, less than 275 um, less than 300 um, less than 325 um, less than 350 um, less than 375 um, less than 400 um, less than 425 um, less than 450 um, less than 475 um, less than 500 um, less than 525 um, less than 550 um, less than 575 um, less than 600 um, less than 625 um, less than 650 um, less than 675 um, less than 700 um, less than 725 um, less than 750 um, less than 775 um, less than 800 um, less than 825 um, less than 850 um, less than 875 um, less than 900 um, less than 925 um, less than 950 um, less than 975 um,

[0451] In another embodiment, polynucleotides may be delivered using smaller LNPs which may comprise a diameter from about 1 nm to about 100 nm, from about 1 nm to about 10 nm, about 1 nm to about 20 nm, from about 1 nm to about 30 nm, from about 1 nm to about 40 nm, from about 1 nm to about 50 nm, from about 1 nm to about 60 nm, from about 1 nm to about 70 nm, from about 1 nm to about 80 nm, from about 1 nm to about 90 nm, from about 5 nm to about from 100 nm, from about 5 nm to about 10 nm, about 5 nm to about 20 nm, from about 5 nm to about 30 nm, from about 5 nm to about 40 nm, from about 5 nm to about 50 nm, from about 5 nm to about 60 nm, from about 5 nm to about 70 nm, from about 5 nm to about 80 nm, from about 5 nm to about 90 nm, about 10 to about 50 nm, from about 20 to about 50 nm, from about 30 to about 50 nm, from about 40 to about 50 nm, from about 20 to about 60 nm, from about 30 to about 60 nm, from about 40 to about 60 nm, from about 20 to about 70 nm, from about 30 to about 70 nm, from about 40 to about 70 nm, from about 50 to about 70 nm, from about 60 to about 70 nm, from about 20 to about 80 nm, from about 30 to about 80 nm, from about 40 to about 80 nm, from about 50 to about 80 nm, from about 60 to about 80 nm, from about 20 to about 90 nm, from about 30 to about 90 nm, from about 40 to about 90 nm, from about 50 to about 90 nm, from about 60 to about 90 nm and/or from about 70 to about 90 nm.

[0452] In some embodiments, such LNPs are synthesized using methods comprising microfluidic mixers. Exemplary microfluidic mixers may include, but are not limited to a slit interdigitial micromixer including, but not limited to those manufactured by Microinnova (Allerheiligen bei Wildon, Austria) and/or a staggered herringbone micromixer (SHM) (Zhigaltsev, I. V. et al., Bottom-up design and synthesis of limit size lipid nanoparticle systems with aqueous and triglyceride cores using millisecond microfluidic mixing have been published (Langmuir. 2012. 28:3633-40; Belliveau, N. M. et al., Microfluidic synthesis of highly potent limit-size lipid nanoparticles for in vivo delivery of siRNA. Molecular Therapy-Nucleic Acids. 2012. 1:e37; Chen, D. et al., Rapid discovery of potent siRNA-containing lipid nanoparticles enabled by controlled microfluidic formulation. J Am Chem Soc. 2012. 134(16):6948-51; each of which is herein incorporated by reference in its entirety). In some embodiments, methods of LNP generation comprising SHM, further comprise the mixing of at least two input streams wherein mixing occurs by microstructure-induced chaotic advection (MICA). According to this method, fluid streams flow through channels present in a herringbone pattern causing rotational flow and folding the fluids around each other. This method may also comprise a surface for fluid mixing wherein the surface changes orientations during fluid cycling. Methods of generating LNPs using SHM include those disclosed in U.S. Application Publication Nos. 2004/0262223 and 2012/0276209, each of which is expressly incorporated herein by reference in their entirety.

[0453] In one embodiment, the polynucleotides of the present invention may be formulated in lipid nanoparticles created using a micromixer such as, but not limited to, a Slit Interdigital Microstructured Mixer (SIMM-V2) or a Standard Slit Interdigital Micro Mixer (SSIMM) or Caterpillar (CPMM) or Impinging-jet (IJMM) from the Institut für Mikrotechnik Mainz GmbH, Mainz Germany).

[0454] In one embodiment, the polynucleotides of the present invention may be formulated in lipid nanoparticles created using microfluidic technology (see Whitesides, George M. The Origins and the Future of Microfluidics. Nature, 2006 442: 368-373; and Abraham et al. Chaotic Mixer for Microchannels. Science, 2002 295: 647-651; each of which is herein incorporated by reference in its entirety). As a non-limiting example, controlled microfluidic formulation includes a passive method for mixing streams of steady pressure-driven flows in micro channels at a low Reynolds number (See e.g., Abraham et al. Chaotic Mixer for Microchannels. Science, 2002 295: 647-651; which is herein incorporated by reference in its entirety).

[0455] In one embodiment, the polynucleotides of the present invention may be formulated in lipid nanoparticles created using a micromixer chip such as, but not limited to, those from Harvard Apparatus (Holliston, Mass.) or Dolomite Microfluidics (Royston, UK). A micromixer chip can be used for rapid mixing of two or more fluid streams with a split and recombine mechanism.

[0456] In one embodiment, the polynucleotides of the invention may be formulated for delivery using the drug encapsulating microspheres described in International Patent Publication No. WO2013063468 or U.S. Pat. No. 8,440,614, each of which is herein incorporated by reference in its entirety. The microspheres may comprise a compound of the formula (I), (II), (III), (IV), (V) or (VI) as described in International patent application WO2013063468, the contents of which are herein incorporated by reference in its entirety. In another aspect, the amino acid, peptide, polypeptide, lipids (APPL) are useful in delivering the polynucleotides of the invention to cells (see International Patent Publication No. WO2013063468, herein incorporated by reference in its entirety).

[0457] In one embodiment, the polynucleotides of the invention may be formulated in lipid nanoparticles having a diameter from about 10 to about 100 nm such as, but not limited to, about 10 to about 20 nm, about 10 to about 30 nm, about 10 to about 40 nm, about 10 to about 50 nm, about 10 to about 60 nm, about 10 to about 70 nm, about 10 to about 80 nm, about 10 to about 90 nm, about 20 to about 30 nm, about 20 to about 40 nm, about 20 to about 50 nm, about 20 to about 60 nm, about 20 to about 70 nm, about 20 to about 80 nm, about 20 to about 90 nm, about 20 to about 100 nm, about 30 to about 40 nm, about 30 to about 50 nm, about 30 to about 60 nm, about 30 to about 70 nm, about 30 to about 80 nm, about 30 to about 90 nm, about 30 to about 100 nm, about 40 to about 50 nm, about 40 to about 60 nm, about 40 to about 70 nm, about 40 to about 80 nm, about 40 to about 90 nm, about 40 to about 100 nm, about 50 to about 60 nm, about 50 to about 70 nm about 50 to about 80 nm, about 50 to about 90 nm, about 50 to about 100 nm, about 60 to about 70 nm, about 60 to about 80 nm, about 60 to about 90 nm, about 60 to about 100 nm, about 70 to about 80 nm, about 70 to about 90 nm, about 70 to about 100 nm, about 80 to about 90 nm, about 80 to about 100 nm and/or about 90 to about 100 nm.

[0458] In one embodiment, the lipid nanoparticles may have a diameter from about 10 to 500 nm.

[0459] In one embodiment, the lipid nanoparticle may have a diameter greater than 100 nm, greater than 150 nm, greater than 200 nm, greater than 250 nm, greater than 300 nm, greater than 350 nm, greater than 400 nm, greater than 450 nm, greater than 500 nm, greater than 550 nm, greater than 600 nm, greater than 650 nm, greater than 700 nm, greater than 750 nm, greater than 800 nm, greater than 850 nm, greater than 900 nm, greater than 950 nm or greater than 1000 nm.

[0460] In one aspect, the lipid nanoparticle may be a limit size lipid nanoparticle described in International Patent Publication No. WO2013059922, the contents of which are herein incorporated by reference in its entirety. The limit size lipid nanoparticle may comprise a lipid bilayer surrounding an aqueous core or a hydrophobic core; where the lipid bilayer may comprise a phospholipid such as, but not limited to, diacylphosphatidylcholine, a diacylphosphatidylethanolamine, a ceramide, a sphingomyelin, a dihydrosphingomyelin, a cephalin, a cerebroside, a C8-C20 fatty acid diacylphophatidylcholine, and 1-palmitoyl-2-oleoyl phosphatidylcholine (POPC). In another aspect the limit size lipid nanoparticle may comprise a polyethylene glycol-lipid such as, but not limited to, DLPE-PEG, DMPE-PEG, DPPC-PEG and DSPE-PEG.

[0461] In one embodiment, the polynucleotides may be delivered, localized and/or concentrated in a specific location using the delivery methods described in International Patent Publication No. WO2013063530, the contents of which are herein incorporated by reference in its entirety. As a non-limiting example, a subject may be administered an empty polymeric particle prior to, simultaneously with or after delivering the polynucleotides to the subject. The empty polymeric particle undergoes a change in volume once in contact with the subject and becomes lodged, embedded, immobilized or entrapped at a specific location in the subject.

[0462] In one embodiment, the polynucleotides may be formulated in an active substance release system (See e.g., US Patent Publication No. US20130102545, herein incorporated by reference in its entirety). The active substance release system may comprise 1) at least one nanoparticle bonded to an oligonucleotide inhibitor strand which is hybridized with a catalytically active nucleic acid and 2) a compound bonded to at least one substrate molecule bonded to a therapeutically active substance (e.g., polynucleotides described herein), where the therapeutically active substance is released by the cleavage of the substrate molecule by the catalytically active nucleic acid.

[0463] In one embodiment, the polynucleotides may be formulated in a nanoparticle comprising an inner core comprising a non-cellular material and an outer surface comprising a cellular membrane. The cellular membrane may be derived from a cell or a membrane derived from a virus. As a non-limiting example, the nanoparticle may be made by the methods described in International Patent Publication No. WO2013052167, herein incorporated by reference in its entirety. As another non-limiting example, the nanoparticle described in International Patent Publication No. WO2013052167, herein incorporated by reference in its entirety, may be used to deliver the polynucleotides described herein.

[0464] In one embodiment, the polynucleotides may be formulated in porous nanoparticle-supported lipid bilayers (protocells). Protocells are described in International Patent Publication No. WO2013056132, the contents of which are herein incorporated by reference in its entirety.

[0465] In one embodiment, the polynucleotides described herein may be formulated in polymeric nanoparticles as described in or made by the methods described in U.S. Pat. Nos. 8,420,123 and 8,518,963 and European Patent No. EP2073848B1, the contents of each of which are herein incorporated by reference in their entirety. As a non-limiting example, the polymeric nanoparticle may have a high glass transition temperature such as the nanoparticles described in or nanoparticles made by the methods described in U.S. Pat. No. 8,518,963, the contents of which are herein incorporated by reference in its entirety. As another non-limiting example, the polymer nanoparticle for oral, parenteral and topical formulations may be made by the methods described in European Patent No. EP2073 848B 1, the contents of which are herein incorporated by reference in its entirety.

[0466] In another embodiment, the polynucleotides described herein may be formulated in nanoparticles used in imaging. The nanoparticles may be liposome nanoparticles such as those described in US Patent Publication No US20130129636, herein incorporated by reference in its entirety. As a non-limiting example, the liposome may comprise gadolinium(III)2-{4,7-bis-carboxymethyl-10-[(N,N-distearylamidomethyl-N-amido-methyl]-1,4,7,10-tetra-azacyclododec-1-yl}-acetic acid and a neutral, fully saturated phospholipid component (see e.g., US Patent Publication No US20130129636, the contents of which is herein incorporated by reference in its entirety).

[0467] In one embodiment, the nanoparticles which may be used in the present invention are formed by the methods described in U.S. Patent Application No. US20130130348, the contents of which is herein incorporated by reference in its entirety.

[0468] The nanoparticles of the present invention may further include nutrients such as, but not limited to, those which deficiencies can lead to health hazards from anemia to neural tube defects (see e.g, the nanoparticles described in International Patent Publication No WO2013072929, the contents of which is herein incorporated by reference in its entirety). As a non-limiting example, the nutrient may be iron in the form of ferrous, ferric salts or elemental iron, iodine, folic acid, vitamins or micronutrients.

[0469] In one embodiment, the polynucleotides of the present invention may be formulated in a swellable nanoparticle. The swellable nanoparticle may be, but is not limited to, those described in U.S. Pat. No. 8,440,231, the contents of which is herein incorporated by reference in its entirety. As a non-limiting embodiment, the swellable nanoparticle may be used for delivery of the polynucleotides of the present invention to the pulmonary system (see e.g., U.S. Pat. No. 8,440,231, the contents of which is herein incorporated by reference in its entirety).

[0470] The polynucleotides of the present invention may be formulated in polyanhydride nanoparticles such as, but not limited to, those described in U.S. Pat. No. 8,449,916, the contents of which is herein incorporated by reference in its entirety.

[0471] The nanoparticles and microparticles of the present invention may be geometrically engineered to modulate macrophage and/or the immune response. In one aspect, the geometrically engineered particles may have varied shapes, sizes and/or surface charges in order to incorporated the polynucleotides of the present invention for targeted delivery such as, but not limited to, pulmonary delivery (see e.g., International Publication No WO2013082111, the contents of which is herein incorporated by reference in its entirety). Other physical features the geometrically engineering particles may have include, but are not limited to, fenestrations, angled arms, asymmetry and surface roughness, charge which can alter the interactions with cells and tissues. As a non-limiting example, nanoparticles of the present invention may be made by the methods described in International Publication No WO2013082111, the contents of which is herein incorporated by reference in its entirety.

[0472] In one embodiment, the nanoparticles of the present invention may be water soluble nanoparticles such as, but not limited to, those described in International Publication No. WO2013090601, the contents of which is herein incorporated by reference in its entirety. The nanoparticles may be inorganic nanoparticles which have a compact and zwitterionic ligand in order to exhibit good water solubility. The nanoparticles may also have small hydrodynamic diameters (HD), stability with respect to time, pH, and salinity and a low level of non-specific protein binding.

[0473] In one embodiment the nanoparticles of the present invention may be developed by the methods described in US Patent Publication No. US20130172406, the contents of which are herein incorporated by reference in its entirety.

[0474] In one embodiment, the nanoparticles of the present invention are stealth nanoparticles or target-specific stealth nanoparticles such as, but not limited to, those described in US Patent Publication No. US20130172406; the contents of which is herein incorporated by reference in its entirety. The nanoparticles of the present invention may be made by the methods described in US Patent Publication No. US20130172406, the contents of which are herein incorporated by reference in its entirety.

[0475] In another embodiment, the stealth or target-specific stealth nanoparticles may comprise a polymeric matrix. The polymeric matrix may comprise two or more polymers such as, but not limited to, polyethylenes, polycarbonates, polyanhydrides, polyhydroxyacids, polypropylfumerates, polycaprolactones, polyamides, polyacetals, polyethers, polyesters, poly(orthoesters), polycyanoacrylates, polyvinyl alcohols, polyurethanes, polyphosphazenes, polyacrylates, polymethacrylates, polycyanoacrylates, polyureas, polystyrenes, polyamines, polyesters, polyanhydrides, polyethers, polyurethanes, polymethacrylates, polyacrylates, polycyanoacrylates or combinations thereof.

[0476] In one embodiment, the nanoparticle may be a nanoparticle-nucleic acid hybrid structure having a high density nucleic acid layer. As a non-limiting example, the nanoparticle-nucleic acid hybrid structure may made by the methods described in US Patent Publication No. US20130171646, the contents of which are herein incorporated by reference in its entirety. The nanoparticle may comprise a nucleic acid such as, but not limited to, polynucleotides described herein and/or known in the art.

[0477] At least one of the nanoparticles of the present invention may be embedded in in the core a nanostructure or coated with a low density porous 3-D structure or coating which is capable of carrying or associating with at least one payload within or on the surface of the nanostructure. Non-limiting examples of the nanostructures comprising at least one nanoparticle are described in International Patent Publication No. WO2013123523, the contents of which are herein incorporated by reference in its entirety.

### Polymers, Biodegradable Nanoparticles, and Core-Shell Nanoparticles

[0478] The polynucleotides of the invention can be formulated using natural and/or synthetic polymers. Non-limiting examples of polymers which may be used for delivery include, but are not limited to, DYNAMIC POLYCONJUGATE® (Arrowhead Research Corp., Pasadena, Calif.) formulations from MIRUS® Bio (Madison, Wis.) and Roche Madison (Madison, Wis.), PHASERX™ polymer formulations such as, without limitation, SMARTT POLYMER TECHNOLOGY™ (PHASERX®, Seattle, Wash.), DMRI/DOPE, poloxamer, VAXFECTIN® adjuvant from Vical (San Diego, Calif.), chitosan, cyclodextrin from Calando Pharmaceuticals (Pasadena, Calif.), dendrimers and poly(lactic-co-glycolic acid) (PLGA) polymers. RONDEL™ (RNAi/Oligonucleotide Nanoparticle Delivery) polymers (Arrowhead Research Corporation, Pasadena, Calif.) and pH responsive co-block polymers such as, but not limited to, PHASERX® (Seattle, Wash.).

[0479] A non-limiting example of chitosan formulation includes a core of positively charged chitosan and an outer portion of negatively charged substrate (U.S. Pub. No. 20120258176; herein incorporated by reference in its entirety). Chitosan includes, but is not limited to N-trimethyl chitosan, mono-N-carboxymethyl chitosan (MCC), N-palmitoyl chitosan (NPCS), EDTA-chitosan, low molecular weight chitosan, chitosan derivatives, or combinations thereof.

[0480] In one embodiment, the polymers used in the present invention have undergone processing to reduce and/or inhibit the attachment of unwanted substances such as, but not limited to, bacteria, to the surface of the polymer. The polymer may be processed by methods known and/or described in the art and/or described in International Pub. No. WO2012150467, herein incorporated by reference in its entirety.

[0481] A non-limiting example of PLGA formulations include, but are not limited to, PLGA injectable depots (e.g., ELIGARD® which is formed by dissolving PLGA in 66% N-methyl-2-pyrrolidone (NMP) and the remainder being aqueous solvent and leuprolide. Once injected, the PLGA and leuprolide peptide precipitates into the subcutaneous space).

[0482] Many of these polymer approaches have demonstrated efficacy in delivering oligonucleotides in vivo into the cell cytoplasm (reviewed in deFougerolles Hum Gene Ther. 2008 19:125-132; herein incorporated by reference in its entirety). Two polymer approaches that have yielded robust in vivo delivery of nucleic acids, in this case with small interfering RNA (siRNA), are dynamic polyconjugates and cyclodextrin-based nanoparticles (see e.g., US Patent Publication No. US20130156721, herein incorporated by reference in its entirety). The first of these delivery approaches uses dynamic polyconjugates and has been shown in vivo in mice to effectively deliver siRNA and silence endogenous target mRNA in hepatocytes (Rozema et al., Proc Natl Acad Sci USA. 2007 104:12982-12887; herein incorporated by reference in its entirety). This particular approach is a multicomponent polymer system whose key features include a membrane-active polymer to which nucleic acid, in this case siRNA, is covalently coupled via a disulfide bond and where both PEG (for charge masking) and N-acetylgalactosamine (for hepatocyte targeting) groups are linked via pH-sensitive bonds (Rozema et al., Proc Natl Acad Sci USA. 2007 104:12982-12887; herein incorporated by reference in its entirety). On binding to the hepatocyte and entry into the endosome, the polymer complex disassembles in the low-pH environment, with the polymer exposing its positive charge, leading to endosomal escape and cytoplasmic release of the siRNA from the polymer. Through replacement of the N-acetylgalactosamine group with a mannose group, it was shown one could alter targeting from asialoglycoprotein receptor-expressing hepatocytes to sinusoidal endothelium and Kupffer cells. Another polymer approach involves using transferrin-targeted cyclodextrin-containing polycation nanoparticles. These nanoparticles have demonstrated targeted silencing of the EWS-FLI1 gene product in transferrin receptor-expressing Ewing's sarcoma tumor cells (Hu-Lieskovan et al., Cancer Res.2005 65: 8984-8982; herein incorporated by reference in its entirety) and siRNA formulated in these nanoparticles was well tolerated in non-human primates (Heidel et al., Proc Natl Acad Sci USA 2007 104:5715-21; herein incorporated by reference in its entirety). Both of these delivery strategies incorporate rational approaches using both targeted delivery and endosomal escape mechanisms.

[0483] The polymer formulation can permit the sustained or delayed release of polynucleotides (e.g., following intramuscular or subcutaneous injection). The altered release profile for the polynucleotide can result in, for example, translation of an encoded protein over an extended period of time. The polymer formulation may also be used to increase the stability of the polynucleotide. Biodegradable polymers have been previously used to protect nucleic acids other than polynucleotide from degradation and been shown to result in sustained release of payloads in vivo (Rozema et al., Proc Natl Acad Sci USA. 2007 104:12982-12887; Sullivan et al., Expert Opin Drug Deliv. 2010 7:1433-1446; Convertine et al., Biomacromolecules. 2010 Oct. 1; Chu et al., Acc Chem Res. 2012 Jan. 13; Manganiello et al., Biomaterials. 2012 33:2301-2309; Benoit et al., Biomacromolecules. 2011 12:2708-2714; Singha et al., Nucleic Acid Ther. 2011 2:133-147; deFougerolles Hum Gene Ther. 2008 19:125-132; Schaffert and Wagner, Gene Ther. 2008 16:1131-1138; Chaturvedi et al., Expert Opin Drug Deliv. 2011 8:1455-1468; Davis, Mol Pharm. 2009 6:659-668; Davis, Nature 2010 464:1067-1070; each of which is herein incorporated by reference in its entirety).

[0484] In one embodiment, the pharmaceutical compositions may be sustained release formulations. In a further embodiment, the sustained release formulations may be for subcutaneous delivery. Sustained release formulations may include, but are not limited to, PLGA microspheres, ethylene vinyl acetate (EVAc), poloxamer, GELSITE® (Nanotherapeutics, Inc. Alachua, Fla.), HYLENEX® (Halozyme Therapeutics, San Diego Calif.), surgical sealants such as fibrinogen polymers (Ethicon Inc. Cornelia, Ga.), TISSELL® (Baxter International, Inc Deerfield, Ill.), PEG-based sealants, and COSEAL® (Baxter International, Inc Deerfield, Ill.).

[0485] As a non-limiting example polynucleotides may be formulated in PLGA microspheres by preparing the PLGA microspheres with tunable release rates (e.g., days and weeks) and encapsulating the polynucleotides in the PLGA microspheres while maintaining the integrity of the polynucleotides during the encapsulation process. EVAc are non-biodegradeable, biocompatible polymers which are used extensively in pre-clinical sustained release implant applications (e.g., extended release products Ocusert a pilocarpine ophthalmic insert for glaucoma or progestasert a sustained release progesterone intrauterine deivce; transdermal delivery systems Testoderm, Duragesic and Selegiline; catheters). Poloxamer F-407 NF is a hydrophilic, non-ionic surfactant triblock copolymer of polyoxyethylene-polyoxypropylene-polyoxyethylene having a low viscosity at temperatures less than 5° C. and forms a solid gel at temperatures greater than 15° C. PEG-based surgical sealants comprise two synthetic PEG components mixed in a delivery device which can be prepared in one minute, seals in 3 minutes and is reabsorbed within 30 days. GELSITE® and natural polymers are capable of in-situ gelation at the site of administration. They have been shown to interact with protein and peptide therapeutic candidates through ionic ineraction to provide a stabilizing effect.

[0486] Polymer formulations can also be selectively targeted through expression of different ligands as exemplified by, but not limited by, folate, transferrin, and N-acetylgalactosamine (GalNAc) (Benoit et al., Biomacromolecules. 2011 12:2708-2714; Rozema et al., Proc Natl Acad Sci USA. 2007 104:12982-12887; Davis, Mol Pharm. 2009 6:659-668; Davis, Nature 2010 464:1067-1070; each of which is herein incorporated by reference in its entirety).

[0487] The polynucleotides of the invention may be formulated with or in a polymeric compound. The polymer may include at least one polymer such as, but not limited to, polyethenes, polyethylene glycol (PEG), poly(l-lysine)(PLL), PEG grafted to PLL, cationic lipopolymer, biodegradable cationic lipopolymer, polyethyleneimine (PEI), cross-linked branched poly(alkylene imines), a polyamine derivative, a modified poloxamer, a biodegradable polymer, elastic biodegradable polymer, biodegradable block copolymer, biodegradable random copolymer, biodegradable polyester copolymer, biodegradable polyester block copolymer, biodegradable polyester block random copolymer, multiblock copolymers, linear biodegradable copolymer, poly[α-(4-aminobutyl)-L-glycolic acid) (PAGA), biodegradable cross-linked cationic multi-block copolymers, polycarbonates, polyanhydrides, polyhydroxyacids, polypropylfumerates, polycaprolactones, polyamides, polyacetals, polyethers, polyesters, poly(orthoesters), polycyanoacrylates, polyvinyl alcohols, polyurethanes, polyphosphazenes, polyacrylates, polymethacrylates, polycyanoacrylates, polyureas, polystyrenes, polyamines, polylysine, poly(ethylene imine), poly(serine ester), poly(L-lactide-co-L-lysine), poly(4-hydroxy-L-proline ester), acrylic polymers, amine-containing polymers, dextran polymers, dextran polymer derivatives or or combinations thereof.

[0488] As a non-limiting example, the polynucleotides of the invention may be formulated with the polymeric compound of PEG grafted with PLL as described in U.S. Pat. No. 6,177,274; herein incorporated by reference in its entirety. The formulation may be used for transfecting cells in vitro or for in vivo delivery of polynucleotide. In another example, the polynucleotide may be suspended in a solution or medium with a cationic polymer, in a dry pharmaceutical composition or in a solution that is capable of being dried as described in U.S. Pub. Nos. 20090042829 and 20090042825; each of which are herein incorporated by reference in their entireties.

[0489] As another non-limiting example the polynucleotides of the invention may be formulated with a PLGA-PEG block copolymer (see US Pub. No. US20120004293 and U.S. Pat. No. 8,236,330, herein incorporated by reference in their entireties) or PLGA-PEG-PLGA block copolymers (See U.S. Pat. No. 6,004,573, herein incorporated by reference in its entirety). As a non-limiting example, the polynucleotides of the invention may be formulated with a diblock copolymer of PEG and PLA or PEG and PLGA (see U.S. Pat. No. 8,246,968, herein incorporated by reference in its entirety).

[0490] A polyamine derivative may be used to deliver nucleic acids or to treat and/or prevent a disease or to be included in an implantable or injectable device (U.S. Pub. No. 20100260817 (now U.S. Pat. No. 8,460,696) the contents of each of which is herein incorporated by reference in its entirety). As a non-limiting example, a pharmaceutical composition may include the polynucleotide and the polyamine derivative described in U.S. Pub. No. 20100260817 (now U.S. Pat. No. 8,460,696; the contents of which are incorporated herein by reference in its entirety. As a non-limiting example the polynucleotides of the present invention may be delivered using a polyaminde polymer such as, but not limited to, a polymer comprising a 1,3-dipolar addition polymer prepared by combining a carbohydrate diazide monomer with a dilkyne unite comprising oligoamines (U.S. Pat. No. 8,236,280; herein incorporated by reference in its entirety).

[0491] The polynucleotides of the invention may be formulated with at least one acrylic polymer. Acrylic polymers include but are not limited to, acrylic acid, methacrylic acid, acrylic acid and methacrylic acid copolymers, methyl methacrylate copolymers, ethoxyethyl methacrylates, cyanoethyl methacrylate, amino alkyl methacrylate copolymer, poly(acrylic acid), poly(methacrylic acid), polycyanoacrylates and combinations thereof.

[0492] In one embodiment, the polynucleotides of the present invention may be formulated with at least one polymer and/or derivatives thereof described in International Publication Nos. WO2011115862, WO2012082574 and WO2012068187 and U.S. Pub. No. 20120283427, each of which are herein incorporated by reference in their entireties. In another embodiment, the polynucleotides of the present invention may be formulated with a polymer of formula Z as described in WO2011115862, herein incorporated by reference in its entirety. In yet another embodiment, the polynucleotides may be formulated with a polymer of formula Z, Z′ or Z″ as described in International Pub. Nos. WO2012082574 or WO2012068187 and U.S. Pub. No. 2012028342, each of which are herein incorporated by reference in their entireties. The polymers formulated with the modified RNA of the present invention may be synthesized by the methods described in International Pub. Nos. WO2012082574 or WO2012068187, each of which are herein incorporated by reference in their entireties.

[0493] The polynucleotides of the invention may be formulated with at least one acrylic polymer. Acrylic polymers include but are not limited to, acrylic acid, methacrylic acid, acrylic acid and methacrylic acid copolymers, methyl methacrylate copolymers, ethoxyethyl methacrylates, cyanoethyl methacrylate, amino alkyl methacrylate copolymer, poly(acrylic acid), poly(methacrylic acid), polycyanoacrylates and combinations thereof.

[0494] Formulations of polynucleotides of the invention may include at least one amine-containing polymer such as, but not limited to polylysine, polyethylene imine, poly(amidoamine) dendrimers, poly(amine-co-esters) or combinations thereof. As a non-limiting example, the poly(amine-co-esters) may be the polymers described in and/or made by the methods described in International Publication No WO2013082529, the contents of which are herein incorporated by reference in its entirety.

[0495] For example, the polynucleotides of the invention may be formulated in a pharmaceutical compound including a poly(alkylene imine), a biodegradable cationic lipopolymer, a biodegradable block copolymer, a biodegradable polymer, or a biodegradable random copolymer, a biodegradable polyester block copolymer, a biodegradable polyester polymer, a biodegradable polyester random copolymer, a linear biodegradable copolymer, PLGA, PAGA, a biodegradable cross-linked cationic multi-block copolymer or combinations thereof. The biodegradable cationic lipopolymer may be made by methods known in the art and/or described in U.S. Pat. No. 6,696,038, U.S. App. Nos. 20030073619 and 20040142474 each of which is herein incorporated by reference in their entireties. The poly(alkylene imine) may be made using methods known in the art and/or as described in U.S. Pub. No. 20100004315, herein incorporated by reference in its entirety. The biodegradabale polymer, biodegradable block copolymer, the biodegradable random copolymer, biodegradable polyester block copolymer, biodegradable polyester polymer, or biodegradable polyester random copolymer may be made using methods known in the art and/or as described in U.S. Pat. Nos. 6,517,869 and 6,267,987, the contents of which are each incorporated herein by reference in their entirety. The linear biodegradable copolymer may be made using methods known in the art and/or as described in U.S. Pat. No. 6,652,886. The PAGA polymer may be made using methods known in the art and/or as described in U.S. Pat. No. 6,217,912 herein incorporated by reference in its entirety. The PAGA polymer may be copolymerized to form a copolymer or block copolymer with polymers such as but not limited to, poly-L-lysine, polyargine, polyornithine, histones, avidin, protamines, polylactides and poly(lactide-co-glycolides). The biodegradable cross-linked cationic multi-block copolymers may be made my methods known in the art and/or as described in U.S. Pat. Nos. 8,057,821, 8,444,992 or U.S. Pub. No. 2012009145 each of which are herein incorporated by reference in their entireties. For example, the multi-block copolymers may be synthesized using linear polyethyleneimine (LPEI) blocks which have distinct patterns as compared to branched polyethyleneimines. Further, the composition or pharmaceutical composition may be made by the methods known in the art, described herein, or as described in U.S. Pub. No. 20100004315 or U.S. Pat. Nos. 6,267,987 and 6,217,912 each of which are herein incorporated by reference in their entireties.

[0496] The polynucleotides of the invention may be formulated with at least one degradable polyester which may contain polycationic side chains. Degradeable polyesters include, but are not limited to, poly(serine ester), poly(L-lactide-co-L-lysine), poly(4-hydroxy-L-proline ester), and combinations thereof. In another embodiment, the degradable polyesters may include a PEG conjugation to form a PEGylated polymer.

[0497] The polynucleotides of the invention may be formulated with at least one crosslinkable polyester. Crosslinkable polyesters include those known in the art and described in US Pub. No. 20120269761, the contents of which is herein incorporated by reference in its entirety.

[0498] The polynucleotides of the invention may be formulated in or with at least one cyclodextrin polymer. Cyclodextrin polymers and methods of making cyclodextrin polymers include those known in the art and described in US Pub. No. 20130184453, the contents of which are herein incorporated by reference in its entirety.

[0499] In one embodiment, the polynucleotides of the invention may be formulated in or with at least one crosslinked cation-binding polymers. Crosslinked cation-binding polymers and methods of making crosslinked cation-binding polymers include those known in the art and described in International Patent Publication No. WO2013106072, WO2013106073 and WO2013106086, the contents of each of which are herein incorporated by reference in its entirety.

[0500] In one embodiment, the polynucleotides of the invention may be formulated in or with at least one branched polymer. Branched polymers and methods of making branched polymers include those known in the art and described in International Patent Publication No. WO2013113071, the contents of each of which are herein incorporated by reference in its entirety.

[0501] In one embodiment, the polynucleotides of the invention may be formulated in or with at least PEGylated albumin polymer. PEGylated albumin polymer and methods of making PEGylated albumin polymer include those known in the art and described in US Patent Publication No. US20130231287, the contents of each of which are herein incorporated by reference in its entirety.

[0502] In one embodiment, the polymers described herein may be conjugated to a lipid-terminating PEG. As a non-limiting example, PLGA may be conjugated to a lipid-terminating PEG forming PLGA-DSPE-PEG. As another non-limiting example, PEG conjugates for use with the present invention are described in International Publication No. WO2008103276, herein incorporated by reference in its entirety. The polymers may be conjugated using a ligand conjugate such as, but not limited to, the conjugates described in U.S. Pat. No. 8,273,363, herein incorporated by reference in its entirety.

[0503] In one embodiment, the polynucleotides disclosed herein may be mixed with the PEGs or the sodium phosphate/sodium carbonate solution prior to administration. In another embodiment, polynucleotides encoding a protein of interest may be mixed with the PEGs and also mixed with the sodium phosphate/sodium carbonate solution. In yet another embodiment, polynucleotides encoding a protein of interest may be mixed with the PEGs and polynucleotides encoding a second protein of interest may be mixed with the sodium phosphate/sodium carbonate solution.

[0504] In one embodiment, the polynucleotides described herein may be conjugated with another compound. Non-limiting examples of conjugates are described in U.S. Pat. Nos. 7,964,578 and 7,833,992, each of which are herein incorporated by reference in their entireties. In another embodiment, modified RNA of the present invention may be conjugated with conjugates of formula 1-122 as described in U.S. Pat. Nos. 7,964,578 and 7,833,992, each of which are herein incorporated by reference in their entireties. The polynucleotides described herein may be conjugated with a metal such as, but not limited to, gold. (See e.g., Giljohann et al. Journ. Amer. Chem. Soc. 2009 131(6): 2072-2073; herein incorporated by reference in its entirety). In another embodiment, the polynucleotides described herein may be conjugated and/or encapsulated in gold-nanoparticles. (International Pub. No. WO201216269 and U.S. Pub. No. 20120302940 and US20130177523; the contents of each of which is herein incorporated by reference in its entirety).

[0505] As described in U.S. Pub. No. 20100004313, herein incorporated by reference in its entirety, a gene delivery composition may include a nucleotide sequence and a poloxamer. For example, the polynucleotides of the present inveition may be used in a gene delivery composition with the poloxamer described in U.S. Pub. No. 20100004313.

[0506] In one embodiment, the polymer formulation of the present invention may be stabilized by contacting the polymer formulation, which may include a cationic carrier, with a cationic lipopolymer which may be covalently linked to cholesterol and polyethylene glycol groups. The polymer formulation may be contacted with a cationic lipopolymer using the methods described in U.S. Pub. No. 20090042829 herein incorporated by reference in its entirety. The cationic carrier may include, but is not limited to, polyethylenimine, poly(trimethylenimine), poly(tetramethylenimine), polypropylenimine, aminoglycoside-polyamine, dideoxy-diamino-b-cyclodextrin, spermine, spermidine, poly(2-dimethylamino)ethyl methacrylate, poly(lysine), poly(histidine), poly(arginine), cationized gelatin, dendrimers, chitosan, 1,2-Dioleoyl-3-Trimethylammonium-Propane(DOTAP), N-[1-(2,3-dioleoyloxy)propyl]-N,N,N-trimethylammonium chloride (DOTMA), 1-[2-(oleoyloxy)ethyl]-2-oleyl-3-(2-hydroxyethyl)imidazolinium chloride (DOTIM), 2,3-dioleyloxy-N-[2(sperminecarboxamido)ethyl]-N,N-dimethyl-1-propanaminium trifluoroacetate (DOSPA), 3B[N—(N′,N′-Dimethylaminoethane)-carbamoyl]Cholesterol Hydrochloride (DC-Cholesterol HCl) diheptadecylamidoglycyl spermidine (DOGS), N,N-distearyl-N,N-dimethylammonium bromide (DDAB), N-(1,2-dimyristyloxyprop-3-yl)-N,N-dimethyl-N-hydroxyethyl ammonium bromide (DMRIE), N,N-dioleyl-N,N-dimethylammonium chloride DODAC) and combinations thereof. As a non-limiting example, the polynucleotides may be formulated with a cationic lipopolymer such as those described in U.S. Patent Application No. 20130065942, herein incorporated by reference in its entirety.

[0507] The polynucleotides of the invention may be formulated in a polyplex of one or more polymers (See e.g., U.S. Pat. No. 8,501,478, U.S. Pub. No. 20120237565 and 20120270927 and 20130149783 and International Patent Pub. No. WO2013090861; the contents of each of which is herein incorporated by reference in its entirety). As a non-limiting example, the polyplex may be formed using the noval alpha-aminoamidine polymers described in International Publication No. WO2013090861, the contents of which are herein incorporated by reference in its entirety. As another non-limiting example, the polyplex may be formed using the click polymers described in U.S. Pat. No. 8,501,478, the contents of which is herein incorporated by reference in its entirety.

[0508] In one embodiment, the polyplex comprises two or more cationic polymers. The cationic polymer may comprise a poly(ethylene imine) (PEI) such as linear PEI. In another embodiment, the polyplex comprises p(TETA/CBA) its PEGylated analog p(TETA/CBA)-g-PEG2k and mixtures thereof (see e.g., US Patent Publication No. US20130149783, the contents of which are herein incorporated by reference in its entirety.

[0509] The polynucleotides of the invention can also be formulated as a nanoparticle using a combination of polymers, lipids, and/or other biodegradable agents, such as, but not limited to, calcium phosphate. Components may be combined in a core-shell, hybrid, and/or layer-by-layer architecture, to allow for fine-tuning of the nanoparticle so to delivery of the polynucleotide, polynucleotides may be enhanced (Wang et al., Nat Mater. 2006 5:791-796; Fuller et al., Biomaterials. 2008 29:1526-1532; DeKoker et al., Adv Drug Deliv Rev. 2011 63:748-761; Endres et al., Biomaterials. 2011 32:7721-7731; Su et al., Mol Pharm. 2011 Jun. 6; 8(3):774-87; herein incorporated by reference in its entirety). As a non-limiting example, the nanoparticle may comprise a plurality of polymers such as, but not limited to hydrophilic-hydrophobic polymers (e.g., PEG-PLGA), hydrophobic polymers (e.g., PEG) and/or hydrophilic polymers (International Pub. No. WO20120225129; the contents of which is herein incorporated by reference in its entirety).

[0510] As another non-limiting example the nanoparticle comprising hydrophilic polymers for the polynucleotides may be those described in or made by the methods described in International Patent Publication No. WO2013119936, the contents of which are herein incorporated by reference in its entirety.

[0511] In one embodiment, the biodegradable polymers which may be used in the present invention are poly(ether-anhydride) block copolymers. As a non-limiting example, the biodegradable polymers used herein may be a block copolymer as described in International Patent Publication No WO2006063249, herein incorporated by reference in its entirety, or made by the methods described in International Patent Publication No WO2006063249, herein incorporated by reference in its entirety.

[0512] In another embodiment, the biodegradable polymers which may be used in the present invention are alkyl and cycloalkyl terminated biodegradable lipids. As a non-limiting example, the alkyl and cycloalkyl terminated biodegradable lipids may be those described in International Publication No. WO2013086322 and/or made by the methods described in International Publication No. WO2013086322; the contents of which are herein incorporated by reference in its entirety.

[0513] In yet another embodiment, the biodegradable polymers which may be used in the present invention are cationic lipids having one or more biodegradable group located in a lipid moiety. As a non-limiting example, the biodegradable lipids may be those described in US Patent Publication No. US20130195920, the contents of which are herein incorporated by reference in its entirety.

[0514] Biodegradable calcium phosphate nanoparticles in combination with lipids and/or polymers have been shown to deliver polynucleotides in vivo. In one embodiment, a lipid coated calcium phosphate nanoparticle, which may also contain a targeting ligand such as anisamide, may be used to deliver the polynucleotide, polynucleotides of the present invention. For example, to effectively deliver siRNA in a mouse metastatic lung model a lipid coated calcium phosphate nanoparticle was used (Li et al., J Contr Rel. 2010 142: 416-421; Li et al., J Contr Rel. 2012 158:108-114; Yang et al., Mol Ther. 2012 20:609-615; herein incorporated by reference in its entirety). This delivery system combines both a targeted nanoparticle and a component to enhance the endosomal escape, calcium phosphate, in order to improve delivery of the siRNA.

[0515] In one embodiment, calcium phosphate with a PEG-polyanion block copolymer may be used to delivery polynucleotides (Kazikawa et al., J Contr Rel. 2004 97:345-356; Kazikawa et al., J Contr Rel. 2006 111:368-370; the contents of each of which are herein incorporated by reference in its entirety).

[0516] In one embodiment, a PEG-charge-conversional polymer (Pitella et al., Biomaterials. 2011 32:3106-3114; the contents of which are herein incorporated by reference in its entirety) may be used to form a nanoparticle to deliver the polynucleotides of the present invention. The PEG-charge-conversional polymer may improve upon the PEG-polyanion block copolymers by being cleaved into a polycation at acidic pH, thus enhancing endosomal escape.

[0517] In one embodiment, a polymer used in the present invention may be a pentablock polymer such as, but not limited to, the pentablock polymers described in International Patent Publication No. WO2013055331, herein incorporated by reference in its entirety. As a non-limiting example, the pentablock polymer comprises PGA-PCL-PEG-PCL-PGA, wherein PEG is polyethylene glycol, PCL is poly(E-caprolactone), PGA is poly(glycolic acid), and PLA is poly(lactic acid). As another non-limiting example, the pentablock polymer comprises PEG-PCL-PLA-PCL-PEG, wherein PEG is polyethylene glycol, PCL is poly(E-caprolactone), PGA is poly(glycolic acid), and PLA is poly(lactic acid).

[0518] In one embodiment, a polymer which may be used in the present invention comprises at least one diepoxide and at least one aminoglycoside (See e.g., International Patent Publication No. WO2013055971, the contents of which are herein incorporated by reference in its entirety). The diepoxide may be selected from, but is not limited to, 1,4 butanediol diglycidyl ether (1,4 B), 1,4-cyclohexanedimethanol diglycidyl ether (1,4 C), 4-vinylcyclohexene diepoxide (4VCD), ethyleneglycol diglycidyl ether (EDGE), glycerol diglycidyl ether (GDE), neopentylglycol diglycidyl ether (NPDGE), poly(ethyleneglycol) diglycidyl ether (PEGDE), poly(propyleneglycol) diglycidyl ether (PPGDE) and resorcinol diglycidyl ether (RDE). The aminoglycoside may be selected from, but is not limited to, streptomycin, neomycin, framycetin, paromomycin, ribostamycin, kanamycin, amikacin, arbekacin, bekanamycin, dibekacin, tobramycin, spectinomycin, hygromycin, gentamicin, netilmicin, sisomicin, isepamicin, verdamicin, astromicin, and apramycin. As a non-limiting example, the polymers may be made by the methods described in International Patent Publication No. WO2013055971, the contents of which are herein incorporated by reference in its entirety. As another non-limiting example, compositions comprising any of the polymers comprising at least one least one diepoxide and at least one aminoglycoside may be made by the methods described in International Patent Publication No. WO2013055971, the contents of which are herein incorporated by reference in its entirety.

[0519] In one embodiment, a polymer which may be used in the present invention may be a cross-linked polymer. As a non-limiting example, the cross-linked polymers may be used to form a particle as described in U.S. Pat. No. 8,414,927, the contents of which are herein incorporated by reference in its entirety. As another non-limiting example, the cross-linked polymer may be obtained by the methods described in US Patent Publication No. US20130172600, the contents of which are herein incorporated by reference in its entirety.

[0520] In another embodiment, a polymer which may be used in the present invention may be a cross-linked polymer such as those described in U.S. Pat. No. 8,461,132, the contents of which are herein incorporated by reference in its entirety. As a non-limiting example, the cross-linked polymer may be used in a therapeutic composition for the treatment of a body tissue. The therapeutic composition may be administered to damaged tissue using various methods known in the art and/or described herein such as injection or catheterization.

[0521] In one embodiment, a polymer which may be used in the present invention may be a di-alphatic substituted pegylated lipid such as, but not limited to, those described in International Patent Publication No. WO2013049328, the contents of which are herein incorporated by reference in its entirety.

[0522] In one embodiment, a block copolymer is PEG-PLGA-PEG (see e.g., the thermosensitive hydrogel (PEG-PLGA-PEG) was used as a TGF-beta1 gene delivery vehicle in Lee et al. Thermosensitive Hydrogel as a Tgf-β1 Gene Delivery Vehicle Enhances Diabetic Wound Healing. Pharmaceutical Research, 2003 20(12): 1995-2000; as a controlled gene delivery system in Li et al. Controlled Gene Delivery System Based on Thermosensitive Biodegradable Hydrogel. Pharmaceutical Research 2003 20(6):884-888; and Chang et al., Non-ionic amphiphilic biodegradable PEG-PLGA-PEG copolymer enhances gene delivery efficiency in rat skeletal muscle. J Controlled Release. 2007 118:245-253; each of which is herein incorporated by reference in its entirety) may be used in the present invention. The present invention may be formulated with PEG-PLGA-PEG for administration such as, but not limited to, intramuscular and subcutaneous administration.

[0523] In another embodiment, the PEG-PLGA-PEG block copolymer is used in the present invention to develop a biodegradable sustained release system. In one aspect, the polynucleotides of the present invention are mixed with the block copolymer prior to administration. In another aspect, the polynucleotides acids of the present invention are co-administered with the block copolymer.

[0524] In one embodiment, the polymer used in the present invention may be a multi-functional polymer derivative such as, but not limited to, a multi-functional N-maleimidyl polymer derivatives as described in U.S. Pat. No. 8,454,946, the contents of which are herein incorporated by reference in its entirety.

[0525] The use of core-shell nanoparticles has additionally focused on a high-throughput approach to synthesize cationic cross-linked nanogel cores and various shells (Siegwart et al., Proc Natl Acad Sci USA. 2011 108:12996-13001; the contents of which are herein incorporated by reference in its entirety). The complexation, delivery, and internalization of the polymeric nanoparticles can be precisely controlled by altering the chemical composition in both the core and shell components of the nanoparticle. For example, the core-shell nanoparticles may efficiently deliver siRNA to mouse hepatocytes after they covalently attach cholesterol to the nanoparticle.

[0526] In one embodiment, a hollow lipid core comprising a middle PLGA layer and an outer neutral lipid layer containing PEG may be used to delivery of the polynucleotide, polynucleotides of the present invention. As a non-limiting example, in mice bearing a luciferease-expressing tumor, it was determined that the lipid-polymer-lipid hybrid nanoparticle significantly suppressed luciferase expression, as compared to a conventional lipoplex (Shi et al, Angew Chem Int Ed. 2011 50:7027-7031; herein incorporated by reference in its entirety).

[0527] In one embodiment, the lipid nanoparticles may comprise a core of the polynucleotides disclosed herein and a polymer shell. The polymer shell may be any of the polymers described herein and are known in the art. In an additional embodiment, the polymer shell may be used to protect the polynucleotides in the core.

[0528] Core-shell nanoparticles for use with the polynucleotides of the present invention are described and may be formed by the methods described in U.S. Pat. No. 8,313,777 or International Patent Publication No. WO2013124867, the contents of each of which are herein incorporated by reference in their entirety.

[0529] In one embodiment, the core-shell nanoparticles may comprise a core of the polynucleotides disclosed herein and a polymer shell. The polymer shell may be any of the polymers described herein and are known in the art. In an additional embodiment, the polymer shell may be used to protect the polynucleotides in the core.

[0530] In one embodiment, the polymer used with the formulations described herein may be a modified polymer (such as, but not limited to, a modified polyacetal) as described in International Publication No. WO2011120053, the contents of which are herein incorporated by reference in its entirety.

[0531] In one embodiment, the formulation may be a polymeric carrier cargo complex comprising a polymeric carrier and at least one nucleic acid molecule. Non-limiting examples of polymeric carrier cargo complexes are described in International Patent Publications Nos. WO2013113326, WO2013113501, WO2013113325, WO2013113502 and WO2013113736 and European Patent Publication No. EP2623121, the contents of each of which are herein incorporated by reference in their entireties. In one aspect the polymeric carrier cargo complexes may comprise a negatively charged nucleic acid molecule such as, but not limited to, those described in International Patent Publication Nos. WO2013113325 and WO2013113502, the contents of each of which are herein incorporated by reference in its entirety.

[0532] In one embodiment, a pharmaceutical composition may comprise polynucleotides of the invention and a polymeric carrier cargo complex. The polynucleotides may encode a protein of interest such as, but not limited to, an antigen from a pathogen associated with infectious disease, an antigen associated with allergy or allergic disease, an antigen associated with autoimmune disease or an antigen associated with cancer or tumor disease (See e.g., the antigens described in International Patent Publications Nos. WO2013113326, WO2013113501, WO2013113325, WO2013113502 and WO2013113736 and European Patent Publication No. EP2623121, the contents of each of which are herein incorporated by reference in their entireties).

[0533] As a non-limiting example, the core-shell nanoparticle may be used to treat an eye disease or disorder (See e.g. US Publication No. 20120321719, the contents of which are herein incorporated by reference in its entirety).

[0534] In one embodiment, the polymer used with the formulations described herein may be a modified polymer (such as, but not limited to, a modified polyacetal) as described in International Publication No. WO2011120053, the contents of which are herein incorporated by reference in its entirety.

### Peptides and Proteins

[0535] The polynucleotides of the invention can be formulated with peptides and/or proteins in order to increase transfection of cells by the polynucleotide. In one embodiment, peptides such as, but not limited to, cell penetrating peptides and proteins and peptides that enable intracellular delivery may be used to deliver pharmaceutical formulations. A non-limiting example of a cell penetrating peptide which may be used with the pharmaceutical formulations of the present invention includes a cell-penetrating peptide sequence attached to polycations that facilitates delivery to the intracellular space, e.g., HIV-derived TAT peptide, penetratins, transportans, or hCT derived cell-penetrating peptides (see, e.g., Caron et al., Mol. Ther. 3(3):310-8 (2001); Langel, Cell-Penetrating Peptides: Processes and Applications (CRC Press, Boca Raton Fla., 2002); El-Andaloussi et al., Curr. Pharm. Des. 11(28):3597-611 (2003); and Deshayes et al., Cell. Mol. Life Sci. 62(16):1839-49 (2005), all of which are incorporated herein by reference in their entirety). The compositions can also be formulated to include a cell penetrating agent, e.g., liposomes, which enhance delivery of the compositions to the intracellular space. Polynucleotides of the invention may be complexed to peptides and/or proteins such as, but not limited to, peptides and/or proteins from Aileron Therapeutics (Cambridge, Mass.) and Permeon Biologics (Cambridge, Mass.) in order to enable intracellular delivery (Cronican et al., ACS Chem. Biol. 2010 5:747-752; McNaughton et al., Proc. Natl. Acad. Sci. USA 2009 106:6111-6116; Sawyer, Chem Biol Drug Des. 2009 73:3-6; Verdine and Hilinski, Methods Enzymol. 2012; 503:3-33; all of which are herein incorporated by reference in its entirety).

[0536] In one embodiment, the cell-penetrating polypeptide may comprise a first domain and a second domain. The first domain may comprise a supercharged polypeptide. The second domain may comprise a protein-binding partner. As used herein, “protein-binding partner” includes, but are not limited to, antibodies and functional fragments thereof, scaffold proteins, or peptides. The cell-penetrating polypeptide may further comprise an intracellular binding partner for the protein-binding partner. The cell-penetrating polypeptide may be capable of being secreted from a cell where the polynucleotide may be introduced.

[0537] Formulations of the including peptides or proteins may be used to increase cell transfection by the polynucleotide, alter the biodistribution of the polynucleotide (e.g., by targeting specific tissues or cell types), and/or increase the translation of encoded protein. (See e.g., International Pub. No. WO2012110636 and WO2013123298; the contents of which are herein incorporated by reference in its entirety).

[0538] In one embodiment, the cell penetrating peptide may be, but is not limited to, those described in US Patent Publication No US20130129726, US20130137644 and US20130164219, each of which is herein incorporated by reference in its entirety.

### Cells

[0539] The polynucleotides of the invention can be transfected ex vivo into cells, which are subsequently transplanted into a subject. As non-limiting examples, the pharmaceutical compositions may include red blood cells to deliver modified RNA to liver and myeloid cells, virosomes to deliver modified RNA in virus-like particles (VLPs), and electroporated cells such as, but not limited to, from MAXCYTE® (Gaithersburg, Md.) and from ERYTECH® (Lyon, France) to deliver modified RNA. Examples of use of red blood cells, viral particles and electroporated cells to deliver payloads other than polynucleotides have been documented (Godfrin et al., Expert Opin Biol Ther. 2012 12:127-133; Fang et al., Expert Opin Biol Ther. 2012 12:385-389; Hu et al., Proc Natl Acad Sci USA. 2011 108:10980-10985; Lund et al., Pharm Res. 2010 27:400-420; Huckriede et al., J Liposome Res. 2007; 17:39-47; Cusi, Hum Vaccin. 2006 2:1-7; de Jonge et al., Gene Ther. 2006 13:400-411; all of which are herein incorporated by reference in its entirety).

[0540] The polynucleotides may be delivered in synthetic VLPs synthesized by the methods described in International Pub No. WO2011085231 and WO2013116656 and US Pub No. 20110171248, the contents of each of which are herein incorporated by reference in their entireties.

[0541] Cell-based formulations of the polynucleotides of the invention may be used to ensure cell transfection (e.g., in the cellular carrier), alter the biodistribution of the polynucleotide (e.g., by targeting the cell carrier to specific tissues or cell types), and/or increase the translation of encoded protein.

Introduction into Cells

[0542] A variety of methods are known in the art and suitable for introduction of nucleic acid into a cell, including viral and non-viral mediated techniques. Examples of typical non-viral mediated techniques include, but are not limited to, electroporation, calcium phosphate mediated transfer, nucleofection, sonoporation, heat shock, magnetofection, liposome mediated transfer, microinjection, microproj ectile mediated transfer (nanoparticles), cationic polymer mediated transfer (DEAE-dextran, polyethylenimine, polyethylene glycol (PEG) and the like) or cell fusion.

[0543] The technique of sonoporation, or cellular sonication, is the use of sound (e.g., ultrasonic frequencies) for modifying the permeability of the cell plasma membrane. Sonoporation methods are known to those in the art and are used to deliver nucleic acids in vivo (Yoon and Park, Expert Opin Drug Deliv. 2010 7:321-330; Postema and Gilj a, Curr Pharm Biotechnol. 2007 8:355-361; Newman and Bettinger, Gene Ther. 2007 14:465-475; all herein incorporated by reference in their entirety). Sonoporation methods are known in the art and are also taught for example as it relates to bacteria in US Patent Publication 20100196983 and as it relates to other cell types in, for example, US Patent Publication 20100009424, each of which are incorporated herein by reference in their entirety.

[0544] Electroporation techniques are also well known in the art and are used to deliver nucleic acids in vivo and clinically (Andre et al., Curr Gene Ther. 2010 10:267-280; Chiarella et al., Curr Gene Ther. 2010 10:281-286; Hojman, Curr Gene Ther. 2010 10:128-138; all herein incorporated by reference in their entirety). Electroporation devices are sold by many companies worldwide including, but not limited to BTX® Instruments (Holliston, Mass.) (e.g., the AgilePulse In Vivo System) and Inovio (Blue Bell, Pa.) (e.g., Inovio SP-5P intramuscular delivery device or the CELLECTRA® 3000 intradermal delivery device). In one embodiment, polynucleotides may be delivered by electroporation as described in Example 9.

### Micro-Organ

[0545] The polynucleotides may be contained in a micro-organ which can then express an encoded polypeptide of interest in a long-lasting therapeutic formulation. Micro-organs and formulations thereof are described in International Patent Application No. PCT/US2014/027077, the contents of which are herein incorporated by reference in its entirety, such as in paragraphs [000701]-[000705].

### Hyaluronidase

[0546] The intramuscular or subcutaneous localized injection of polynucleotides of the invention can include hyaluronidase, which catalyzes the hydrolysis of hyaluronan. By catalyzing the hydrolysis of hyaluronan, a constituent of the interstitial barrier, hyaluronidase lowers the viscosity of hyaluronan, thereby increasing tissue permeability (Frost, Expert Opin. Drug Deliv. (2007) 4:427-440; herein incorporated by reference in its entirety). It is useful to speed their dispersion and systemic distribution of encoded proteins produced by transfected cells. Alternatively, the hyaluronidase can be used to increase the number of cells exposed to a polynucleotide of the invention administered intramuscularly or subcutaneously.

### Nanoparticle Mimics

[0547] The polynucleotides of the invention may be encapsulated within and/or absorbed to a nanoparticle mimic. A nanoparticle mimic can mimic the delivery function organisms or particles such as, but not limited to, pathogens, viruses, bacteria, fungus, parasites, prions and cells. As a non-limiting example the polynucleotides of the invention may be encapsulated in a non-viron particle which can mimic the delivery function of a virus (see International Pub. No. WO2012006376 and US Patent Publication No. US20130171241 and US20130195968, the contents of each of which are herein incorporated by reference in its entirety).

### Nanotubes

[0548] The polynucleotides of the invention can be attached or otherwise bound to at least one nanotube such as, but not limited to, rosette nanotubes, rosette nanotubes having twin bases with a linker, carbon nanotubes and/or single-walled carbon nanotubes, The polynucleotides may be bound to the nanotubes through forces such as, but not limited to, steric, ionic, covalent and/or other forces. Nanotubes and nanotube formulations comprising polynucleotides are described in International Patent Application No. PCT/US2014/027077, the contents of which are herein incorporated by reference in its entirety, such as in paragraphs [000708]-[000714].

### Conjugates

[0549] The polynucleotides of the invention include conjugates, such as a polynucleotide covalently linked to a carrier or targeting group, or including two encoding regions that together produce a fusion protein (e.g., bearing a targeting group and therapeutic protein or peptide).

[0550] The conjugates of the invention include a naturally occurring substance, such as a protein (e.g., human serum albumin (HSA), low-density lipoprotein (LDL), high-density lipoprotein (HDL), or globulin); an carbohydrate (e.g., a dextran, pullulan, chitin, chitosan, inulin, cyclodextrin or hyaluronic acid); or a lipid. The ligand may also be a recombinant or synthetic molecule, such as a synthetic polymer, e.g., a synthetic polyamino acid, an oligonucleotide (e.g. an aptamer). Examples of polyamino acids include polyamino acid is a polylysine (PLL), poly L-aspartic acid, poly L-glutamic acid, styrene-maleic acid anhydride copolymer, poly(L-lactide-co-glycolied) copolymer, divinyl ether-maleic anhydride copolymer, N-(2-hydroxypropyl)methacrylamide copolymer (HMPA), polyethylene glycol (PEG), polyvinyl alcohol (PVA), polyurethane, poly(2-ethylacryllic acid), N-isopropylacrylamide polymers, or polyphosphazine. Example of polyamines include: polyethylenimine, polylysine (PLL), spermine, spermidine, polyamine, pseudopeptide-polyamine, peptidomimetic polyamine, dendrimer polyamine, arginine, amidine, protamine, cationic lipid, cationic porphyrin, quaternary salt of a polyamine, or an alpha helical peptide.

[0551] Representative U.S. patents that teach the preparation of polynucleotide conjugates, particularly to RNA, include, but are not limited to, U.S. Pat. Nos. 4,828,979; 4,948,882; 5,218,105; 5,525,465; 5,541,313; 5,545,730; 5,552,538; 5,578,717, 5,580,731; 5,591,584; 5,109,124; 5,118,802; 5,138,045; 5,414,077; 5,486,603; 5,512,439; 5,578,718; 5,608,046; 4,587,044; 4,605,735; 4,667,025; 4,762,779; 4,789,737; 4,824,941; 4,835,263; 4,876,335; 4,904,582; 4,958,013; 5,082,830; 5,112,963; 5,214,136; 5,082,830; 5,112,963; 5,214,136; 5,245,022; 5,254,469; 5,258,506; 5,262,536; 5,272,250; 5,292,873; 5,317,098; 5,371,241, 5,391,723; 5,416,203, 5,451,463; 5,510,475; 5,512,667; 5,514,785; 5,565,552; 5,567,810; 5,574,142; 5,585,481; 5,587,371; 5,595,726; 5,597,696; 5,599,923; 5,599,928 and 5,688,941; 6,294,664; 6,320,017; 6,576,752; 6,783,931; 6,900,297; 7,037,646; each of which is herein incorporated by reference in their entireties.

[0552] In one embodiment, the conjugate of the present invention may function as a carrier for the polynucleotides of the present invention. The conjugate may comprise a cationic polymer such as, but not limited to, polyamine, polylysine, polyalkylenimine, and polyethylenimine which may be grafted to with poly(ethylene glycol). As a non-limiting example, the conjugate may be similar to the polymeric conjugate and the method of synthesizing the polymeric conjugate described in U.S. Pat. No. 6,586,524 herein incorporated by reference in its entirety.

[0553] A non-limiting example of a method for conjugation to a substrate is described in US Patent Publication No. US20130211249, the contents of which are herein incorporated by reference in its entirety. The method may be used to make a conjugated polymeric particle comprising a polynucleotide.

[0554] The conjugates can also include targeting groups, e.g., a cell or tissue targeting agent, e.g., a lectin, glycoprotein, lipid or protein, e.g., an antibody, that binds to a specified cell type such as a kidney cell. A targeting group can be a thyrotropin, melanotropin, lectin, glycoprotein, surfactant protein A, Mucin carbohydrate, multivalent lactose, multivalent galactose, N-acetyl-galactosamine, N-acetyl-gulucosamine multivalent mannose, multivalent fucose, glycosylated polyaminoacids, multivalent galactose, transferrin, bisphosphonate, polyglutamate, polyaspartate, a lipid, cholesterol, a steroid, bile acid, folate, vitamin B12, biotin, an RGD peptide, an RGD peptide mimetic or an aptamer.

[0555] Targeting groups can be proteins, e.g., glycoproteins, or peptides, e.g., molecules having a specific affinity for a co-ligand, or antibodies e.g., an antibody, that binds to a specified cell type such as a cancer cell, endothelial cell, or bone cell. Targeting groups may also include hormones and hormone receptors. They can also include non-peptidic species, such as lipids, lectins, carbohydrates, vitamins, cofactors, multivalent lactose, multivalent galactose, N-acetyl-galactosamine, N-acetyl-gulucosamine multivalent mannose, multivalent fucose, or aptamers. The ligand can be, for example, a lipopolysaccharide, or an activator of p38 MAP kinase.

[0556] The targeting group can be any ligand that is capable of targeting a specific receptor. Examples include, without limitation, folate, Ga1NAc, galactose, mannose, mannose-6P, apatamers, integrin receptor ligands, chemokine receptor ligands, transferrin, biotin, serotonin receptor ligands, PSMA, endothelin, GCPII, somatostatin, LDL, and HDL ligands. In particular embodiments, the targeting group is an aptamer. The aptamer can be unmodified or have any combination of modifications disclosed herein.

[0557] As a non-limiting example, the targeting group may be a glutathione receptor (GR)-binding conjugate for targeted delivery across the blood-central nervous system barrier (See e.g., US Patent Publication No. US2013021661012, the contents of which are herein incorporated by reference in its entirety.

[0558] In one embodiment, the conjugate of the present invention may be a synergistic biomolecule-polymer conjugate. The synergistic biomolecule-polymer conjugate may be long-acting continuous-release system to provide a greater therapeutic efficacy. The synergistic biomolecule-polymer conjugate may be those described in US Patent Publication No. US20130195799, the contents of which are herein incorporated by reference in its entirety.

[0559] In another embodiment, the conjugate which may be used in the present invention may be an aptamer conjugate. Non-limiting examples of apatamer conjugates are described in International Patent Publication No. WO2012040524, the contents of which are herein incorporated by reference in its entirety. The aptamer conjugates may be used to provide targeted delivery of formulations comprising polynucleotides.

[0560] In one embodiment, the conjugate which may be used in the present invention may be an amine containing polymer conjugate. Non-limiting examples of amine containing polymer conjugate are described in U.S. Pat. No. 8,507,653, the contents of which are herein incorporated by reference in its entirety.

[0561] In one embodiment, pharmaceutical compositions of the present invention may include chemical modifications such as, but not limited to, modifications similar to locked nucleic acids.

[0562] Representative U.S. patents that teach the preparation of locked nucleic acid (LNA) such as those from Santaris, include, but are not limited to, the following: U.S. Pat. Nos. 6,268,490; 6,670,461; 6,794,499; 6,998,484; 7,053,207; 7,084,125; and 7,399,845, each of which is herein incorporated by reference in its entirety.

[0563] Representative U.S. patents that teach the preparation of PNA compounds include, but are not limited to, U.S. Pat. Nos. 5,539,082; 5,714,331; and 5,719,262, each of which is herein incorporated by reference. Further teaching of PNA compounds can be found, for example, in Nielsen et al., Science, 1991, 254, 1497-1500.

[0564] Some embodiments featured in the invention include polynucleotides with phosphorothioate backbones and oligonucleosides with other modified backbones, and in particular —CH₂—NH—CH₂—, —CH₂—N(CH₃)—O—CH₂—[known as a methylene (methylimino) or MMI backbone], —CH₂—O—N(CH₃)—CH₂—, —CH₂—N(CH₃)—N(CH₃)—CH₂— and —N(CH₃)—CH₂—CH₂—[wherein the native phosphodiester backbone is represented as —O—P(O)₂—O—CH₂—] of the above-referenced U.S. Pat. No. 5,489,677, and the amide backbones of the above-referenced U.S. Pat. No. 5,602,240. In some embodiments, the polynucletides featured herein have morpholino backbone structures of the above-referenced U.S. Pat. No. 5,034,506.

[0565] Modifications at the 2′ position may also aid in delivery. Preferably, modifications at the 2′ position are not located in a polypeptide-coding sequence, i.e., not in a translatable region. Modifications at the 2′ position may be located in a 5′UTR, a 3′UTR and/or a tailing region. Modifications at the 2′ position can include one of the following at the 2′ position: H (i.e., 2′-deoxy); F; O-, S-, or N-alkyl; O-, S-, or N-alkenyl; O-, S- or N-alkynyl; or O-alkyl-O-alkyl, wherein the alkyl, alkenyl and alkynyl may be substituted or unsubstituted C₁ to C₁₀ alkyl or C₂ to C₁₀ alkenyl and alkynyl. Exemplary suitable modifications include O[(CH₂)ₙO]ₘCH₃, O(CH₂)_{.n}OCH₃, O(CH₂)ₙNH₂, O(CH₂) ₙCH₃, O(CH₂)ₙONH₂, and O(CH₂)ₙON[(CH₂)ₙCH₃)]2, where n and m are from 1 to about 10. In other embodiments, the polynucleotides include one of the following at the 2′ position: C₁ to C₁₀ lower alkyl, substituted lower alkyl, alkaryl, aralkyl, O-alkaryl or O-aralkyl, SH, SCH₃, OCN, Cl, Br, CN, CF₃, OCF₃, SOCH₃, SO₂CH₃, ONO₂, NO₂, N₃, NH₂, heterocycloalkyl, heterocycloalkaryl, aminoalkylamino, polyalkylamino, substituted silyl, an RNA cleaving group, a reporter group, an intercalator, a group for improving the pharmacokinetic properties, or a group for improving the pharmacodynamic properties, and other substituents having similar properties. In some embodiments, the modification includes a 2′-methoxyethoxy (2′-O—CH₂CH₂OCH₃, also known as 2′-O-(2-methoxyethyl) or 2′-MOE) (Martin et al., Helv. Chim. Acta, 1995, 78:486-504) i.e., an alkoxy-alkoxy group. Another exemplary modification is 2′-dimethylaminooxyethoxy, i.e., a O(CH₂)₂ON(CH₃)₂ group, also known as 2′-DMAOE, as described in examples herein below, and 2′-dimethylaminoethoxyethoxy (also known in the art as 2′-O-dimethylaminoethoxyethyl or 2′-DMAEOE), i.e., 2′-O—CH₂—O—CH₂—N(CH₂)₂, also described in examples herein below. Other modifications include 2′-methoxy (2′-OCH3), 2′-aminopropoxy (2′-OCH₂CH₂CH₂NH₂) and 2′-fluoro (2′-F). Similar modifications may also be made at other positions, particularly the 3′ position of the sugar on the 3′ terminal nucleotide or in 2′-5′ linked dsRNAs and the 5′ position of 5′ terminal nucleotide. Polynucleotides of the invention may also have sugar mimetics such as cyclobutyl moieties in place of the pentofuranosyl sugar. Representative U.S. patents that teach the preparation of such modified sugar structures include, but are not limited to, U.S. Pat. Nos. 4,981,957; 5,118,800; 5,319,080; 5,359,044; 5,393,878; 5,446,137; 5,466,786; 5,514,785; 5,519,134; 5,567,811; 5,576,427; 5,591,722; 5,597,909; 5,610,300; 5,627,053; 5,639,873; 5,646,265; 5,658,873; 5,670,633; and 5,700,920; the contents of each of which is herein incorporated by reference in their entirety.

[0566] In still other embodiments, the polynucleotide is covalently conjugated to a cell penetrating polypeptide. The cell-penetrating peptide may also include a signal sequence. The conjugates of the invention can be designed to have increased stability; increased cell transfection; and/or altered the biodistribution (e.g., targeted to specific tissues or cell types).

[0567] In one embodiment, the polynucleotides may be conjugated to an agent to enhance delivery. As a non-limiting example, the agent may be a monomer or polymer such as a targeting monomer or a polymer having targeting blocks as described in International Publication No. WO2011062965, herein incorporated by reference in its entirety. In another non-limiting example, the agent may be a transport agent covalently coupled to the polynucleotides of the present invention (See e.g., U.S. Pat. Nos. 6,835,393 and 7,374,778, each of which is herein incorporated by reference in its entirety). In yet another non-limiting example, the agent may be a membrane barrier transport enhancing agent such as those described in U.S. Pat. Nos. 7,737,108 and 8,003,129, each of which is herein incorporated by reference in its entirety.

[0568] In another embodiment, polynucleotides may be conjugated to SMARTT POLYMER TECHNOLOGY® (PHASERX®, Inc. Seattle, Wash.).

[0569] In another aspect, the conjugate may be a peptide that selectively directs the nanoparticle to neurons in a tissue or organism. As a non-limiting example, the peptide used may be, but is not limited to, the peptides described in US Patent Publication No US20130129627, herein incorporated by reference in its entirety.

[0570] In yet another aspect, the conjugate may be a peptide that can assist in crossing the blood-brain barrier.

### Self-Assembled Nanoparticles

[0571] The polynucleotides described herein may be formulated in self-assembled nanoparticles. Nucleic acid self-assembled nanoparticles are described in International Patent Application No. PCT/US2014/027077, the contents of which are herein incorporated by reference in its entirety, such as in paragraphs [000740]-[000743]. Polymer-based self-assembled nanoparticles are described in International Patent Application No. PCT/US2014/027077, the contents of which are herein incorporated by reference in its entirety, such as in paragraphs [000744]-[000749].

### Self-Assembled Macromolecules

[0572] The polynucleotides may be formulated in amphiphilic macromolecules (AMs) for delivery. AMs comprise biocompatible amphiphilic polymers which have an alkylated sugar backbone covalently linked to poly(ethylene glycol). In aqueous solution, the AMs self-assemble to form micelles. Non-limiting examples of methods of forming AMs and AMs are described in US Patent Publication No. US20130217753, the contents of which are herein incorporated by reference in its entirety.

### Inorganic Nanoparticles

[0573] The polynucleotides of the present invention may be formulated in inorganic nanoparticles (U.S. Pat. No. 8,257,745, herein incorporated by reference in its entirety). The inorganic nanoparticles may include, but are not limited to, clay substances that are water swellable. As a non-limiting example, the inorganic nanoparticle may include synthetic smectite clays which are made from simple silicates (See e.g., U.S. Pat. Nos. 5,585,108 and 8,257,745 each of which are herein incorporated by reference in their entirety).

[0574] In one embodiment, the inorganic nanoparticles may comprise a core of the polynucleotides disclosed herein and a polymer shell. The polymer shell may be any of the polymers described herein and are known in the art. In an additional embodiment, the polymer shell may be used to protect the polynucleotides in the core.

### Semi-Conductive and Metallic Nanoparticles

[0575] The polynucleotides of the present invention may be formulated in water-dispersible nanoparticle comprising a semiconductive or metallic material (U.S. Pub. No. 20120228565; herein incorporated by reference in its entirety) or formed in a magnetic nanoparticle (U.S. Pub. No. 20120265001 and 20120283503; each of which is herein incorporated by reference in its entirety). The water-dispersible nanoparticles may be hydrophobic nanoparticles or hydrophilic nanoparticles.

[0576] In one embodiment, the semi-conductive and/or metallic nanoparticles may comprise a core of the polynucleotides disclosed herein and a polymer shell. The polymer shell may be any of the polymers described herein and are known in the art. In an additional embodiment, the polymer shell may be used to protect the polynucleotides in the core.

### Surgical Sealants: Gels and Hydrogels

[0577] In one embodiment, the polynucleotides disclosed herein may be encapsulated into any hydrogel known in the art which may form a gel when injected into a subject. Surgical sealants such as gels and hydrogels are described in International Patent Application No. PCT/US2014/027077, the contents of which are herein incorporated by reference in its entirety, such as in paragraphs [000762]-[000809].

### Suspension Formulations

[0578] In some embodiments, suspension formulations are provided comprising polynucleotides, water immiscible oil depots, surfactants and/or co-surfactants and/or co-solvents. Combinations of oils and surfactants may enable suspension formulation with polynucleotides. Delivery of polynucleotides in a water immiscible depot may be used to improve bioavailability through sustained release of mRNA from the depot to the surrounding physiologic environment and prevent polynucleotides degradation by nucleases.

[0579] In some embodiments, suspension formulations of mRNA may be prepared using combinations of polynucleotides, oil-based solutions and surfactants. Such formulations may be prepared as a two-part system comprising an aqueous phase comprising polynucleotides and an oil-based phase comprising oil and surfactants. Exemplary oils for suspension formulations may include, but are not limited to sesame oil and Miglyol (comprising esters of saturated coconut and palmkernel oil-derived caprylic and capric fatty acids and glycerin or propylene glycol), corn oil, soybean oil, peanut oil, beeswax and/or palm seed oil. Exemplary surfactants may include, but are not limited to Cremophor, polysorbate 20, polysorbate 80, polyethylene glycol, transcutol, Capmul®, labrasol, isopropyl myristate, and/or Span 80. In some embodiments, suspensions may comprise co-solvents including, but not limited to ethanol, glycerol and/or propylene glycol.

[0580] Suspensions may be formed by first preparing polynucleotides formulation comprising an aqueous solution of polynucleotide and an oil-based phase comprising one or more surfactants. Suspension formation occurs as a result of mixing the two phases (aqueous and oil-based). In some embodiments, such a suspension may be delivered to an aqueous phase to form an oil-in-water emulsion. In some embodiments, delivery of a suspension to an aqueous phase results in the formation of an oil-in-water emulsion in which the oil-based phase comprising polynucleotides forms droplets that may range in size from nanometer-sized droplets to micrometer-sized droplets. In some embodiments, specific combinations of oils, surfactants, cosurfactants and/or co-solvents may be utilized to suspend polynucleotides in the oil phase and/or to form oil-in-water emulsions upon delivery into an aqueous environment.

[0581] In some embodiments, suspensions may provide modulation of the release of polynucleotides into the surrounding environment. In such embodiments, polynucleotides release may be modulated by diffusion from a water immiscible depot followed by resolubilization into a surrounding environment (e.g. an aqueous environment).

[0582] In some embodiments, polynucleotides within a water immiscible depot (e.g. suspended within an oil phase) may result in altered polynucleotides stability (e.g. altered degradation by nucleases).

[0583] In some embodiments, polynucleotides may be formulated such that upon injection, an emulsion forms spontaneously (e.g. when delivered to an aqueous phase). Such particle formation may provide a high surface area to volume ratio for release of polynucleotides from an oil phase to an aqueous phase.

[0584] In one embodiment, the polynucleotides may be formulated in a nanoemulsion such as, but not limited to, the nanoemulsions described in U.S. Pat. No. 8,496,945, the contents of which are herein incorporated by reference in its entirety. The nanoemulsions may comprise nanoparticles described herein. As a non-limiting example, the nanoparticles may comprise a liquid hydrophobic core which may be surrounded or coated with a lipid or surfactant layer. The lipid or surfactant layer may comprise at least one membrane-integrating peptide and may also comprise a targeting ligand (see e.g., U.S. Pat. No. 8,496,945, the contents of which are herein incorporated by reference in its entirety).

### Cations and Anions

[0585] Formulations of polynucleotides disclosed herein may include cations or anions. In one embodiment, the formulations include metal cations such as, but not limited to, Zn2+, Ca2+, Cu2+, Mg+ and combinations thereof. As a non-limiting example, formulations may include polymers and a polynucleotide complexed with a metal cation (See e.g., U.S. Pat. Nos. 6,265,389 and 6,555,525, each of which is herein incorporated by reference in its entirety).

[0586] In some embodiments, cationic nanoparticles comprising combinations of divalent and monovalent cations may be formulated with polynucleotides. Such nanoparticles may form spontaneously in solution over a give period (e.g. hours, days, etc). Such nanoparticles do not form in the presence of divalent cations alone or in the presence of monovalent cations alone. The delivery of polynucleotides in cationic nanoparticles or in one or more depot comprising cationic nanoparticles may improve polynucleotide bioavailability by acting as a long-acting depot and/or reducing the rate of degradation by nucleases.

### Molded Nanoparticles and Microparticles

[0587] The polynucleotides disclosed herein may be formulated in nanoparticles and/or microparticles. These nanoparticles and/or microparticles may be molded into any size shape and chemistry. As an example, the nanoparticles and/or microparticles may be made using the PRINT® technology by LIQUIDA TECHNOLOGIES® (Morrisville, N.C.) (See e.g., International Pub. No. WO2007024323; the contents of which are herein incorporated by reference in its entirety).

[0588] In one embodiment, the molded nanoparticles may comprise a core of the polynucleotides disclosed herein and a polymer shell. The polymer shell may be any of the polymers described herein and are known in the art. In an additional embodiment, the polymer shell may be used to protect the polynucleotides in the core.

[0589] In one embodiment, the polynucleotides of the present invention may be formulated in microparticles. The microparticles may contain a core of the polynucleotides and a cortext of a biocompatible and/or biodegradable polymer. As a non-limiting example, the microparticles which may be used with the present invention may be those described in U.S. Pat. No. 8,460,709, U.S. Patent Publication No. US20130129830 and International Patent Publication No WO2013075068, each of which is herein incorporated by reference in its entirety. As another non-limiting example, the microparticles may be designed to extend the release of the polynucleotides of the present invention over a desired period of time (see e.g, extended release of a therapeutic protein in U.S. Patent Publication No. US20130129830, herein incorporated by reference in its entirety).

[0590] The microparticle for use with the present invention may have a diameter of at least 1 micron to at least 100 microns (e.g., at least 1 micron, at least 5 micron, at least 10 micron, at least 15 micron, at least 20 micron, at least 25 micron, at least 30 micron, at least 35 micron, at least 40 micron, at least 45 micron, at least 50 micron, at least 55 micron, at least 60 micron, at least 65 micron, at least 70 micron, at least 75 micron, at least 80 micron, at least 85 micron, at least 90 micron, at least 95 micron, at least 97 micron, at least 99 micron, and at least 100 micron).

### NanoJackets and NanoLiposomes

[0591] The polynucleotides disclosed herein may be formulated in NanoJackets and NanoLiposomes by Keystone Nano (State College, Pa.). NanoJackets are made of compounds that are naturally found in the body including calcium, phosphate and may also include a small amount of silicates. Nanojackets may range in size from 5 to 50 nm and may be used to deliver hydrophilic and hydrophobic compounds such as, but not limited to, polynucleotides.

[0592] NanoLiposomes are made of lipids such as, but not limited to, lipids which naturally occur in the body. NanoLiposomes may range in size from 60-80 nm and may be used to deliver hydrophilic and hydrophobic compounds such as, but not limited to, polynucleotides. In one aspect, the polynucleotides disclosed herein are formulated in a NanoLiposome such as, but not limited to, Ceramide NanoLiposomes.

### Pseudovirions

[0593] In one embodiment, the polynucleotides disclosed herein may be formulated in Pseudovirions (e.g., pseudo-virions). As a non-limiting example, the pseudovirions may be those developed and/or are described by Aura Biosciences (Cambridge, Mass.). In one aspect, the pseudovirion may be developed to deliver drugs to keratinocytes and basal membranes (See e.g., US Patent Publication Nos. US20130012450, US20130012566, US21030012426 and US20120207840 and International Publication No. WO2013009717, each of which is herein incorporated by reference in its entirety).

[0594] In one embodiment, the pseudovirion used for delivering the polynucleotides of the present invention may be derived from viruses such as, but not limited to, herpes and papillomaviruses (See e.g., US Patent Publication Nos. US Patent Publication Nos. US20130012450, US20130012566, US21030012426 and US20120207840 and International Publication No. WO2013009717, each of which is herein incorporated by reference in its entirety; and Ma et al. HPV pseudovirions as DNA delivery vehicles. Ther Deliv. 2011: 2(4): 427-430; Kines et al. The initial steps leading to papillomavirus infection occur on the basement membrane prior to cell surface binding. PNAS 2009:106(48), 20458-20463; Roberts et al. Genital transmission of HPV in a mouse model is potentiated by nonoxynol-9 and inhibited by carrageenan. Nature Medicine. 2007:13(7) 857-861; Gordon et al., Targeting the Vaginal Mucosa with Human Papillomavirus Psedudovirion Vaccines delivering SIV DNA. J Immunol. 2012 188(2) 714-723; Cuburu et al., Intravaginal immunization with HPV vectors induces tissue-resident CD8+T cell responses. The Journal of Clinical Investigation. 2012: 122(12) 4606-4620; Hung et al., Ovarian Cancer Gene Therapy Using HPV-16 Psedudovirion Carrying the HSV-tk Gene. PLoS ONE. 2012: 7(7) e40983; Johnson et al., Role of Heparan Sulfate in Attachment to and Infection of the Murine Femal Genital Tract by Human Papillomavirus. J Virology. 2009: 83(5) 2067-2074; each of which is herein incorporated by reference in its entirety).

[0595] The pseudovirion may be a virus-like particle (VLP) prepared by the methods described in US Patent Publication No. US20120015899 and US20130177587 and International Patent Publication No. WO2010047839 WO2013116656, WO2013106525 and WO2013122262, the contents of each of which is herein incorporated by reference in its entirety. In one aspect, the VLP may be, but is not limited to, bacteriophages MS, Qβ, R17, fr, GA, Sp, MI, I, MXI, NL95, AP205, f2, PP7, and the plant viruses Turnip crinkle virus (TCV), Tomato bushy stunt virus (TBSV), Southern bean mosaic virus (SBMV) and members of the genus Bromovirus including Broad bean mottle virus, Brome mosaic virus, Cassia yellow blotch virus, Cowpea chlorotic mottle virus (CCMV), Melandrium yellow fleck virus, and Spring beauty latent virus. In another aspect, the VLP may be derived from the influenza virus as described in US Patent Publication No. US20130177587 or U.S. Pat. No. 8,506,967, the contents of each of which are herein incorporated by reference in its entirety. In yet another aspect, the VLP may comprise a B7-1 and/or B7-2 molecule anchored to a lipid membrane or the exterior of the particle such as described in International Patent Publication No. WO2013116656, the contents of which are herein incorporated by reference in its entirety. In one aspect, the VLP may be derived from norovirus, rotavirus recombinant VP6 protein or double layered VP2/VP6 such as the VLP described in International Patent Publication No. WO2012049366, the contents of which are herein incorporated by reference in its entirety.

[0596] The pseudovirion may be a human papilloma virus-like particle such as, but not limited to, those described in International Publication No. WO2010120266 and US Patent Publication No. US20120171290, each of which is herein incorporated by reference in its entirety and Ma et al. HPV pseudovirions as DNA delivery vehicles. Ther Deliv. 2011: 2(4): 427-430; Kines et al. The initial steps leading to papillomavirus infection occur on the basement membrane prior to cell surface binding. PNAS 2009:106(48), 20458-20463; Roberts et al. Genital transmission of HPV in a mouse model is potentiated by nonoxynol-9 and inhibited by carrageenan. Nature Medicine. 2007:13(7) 857-861; Gordon et al., Targeting the Vaginal Mucosa with Human Papillomavirus Psedudovirion Vaccines delivering SIV DNA. J Immunol. 2012 188(2) 714-723; Cuburu et al., Intravaginal immunization with HPV vectors induces tissue-resident CD8+T cell responses. The Journal of Clinical Investigation. 2012: 122(12) 4606-4620; Hung et al., Ovarian Cancer Gene Therapy Using HPV-16 Psedudovirion Carrying the HSV-tk Gene. PLoS ONE. 2012: 7(7) e40983; Johnson et al., Role of Heparan Sulfate in Attachment to and Infection of the Murine Femal Genital Tract by Human Papillomavirus. J Virology. 2009: 83(5) 2067-2074; each of which is herein incorporated by reference in its entirety.

[0597] In one aspect, the pseudovirions may be virion derived nanoparticles such as, but not limited to, those described in US Patent Publication No. US20130116408 and US20130115247, each of which is herein incorporated by reference in their entirety. As a non-limiting example, the virion derived nanoparticles may be used to deliver polynucleotides which may be used in the treatment for cancer and/or enhance the immune system's recognition of the tumor. As a non-limiting example, the virion-derived nanoparticle which may selectively deliver an agent to at least one tumor may be the papilloma-derived particles described in International Patent Publication No. WO2013119877, the contents of which are herein incorporated by reference in its entirety. The virion derived nanoparticles may be made by the methods described in US Patent Publication No. US20130116408 and US20130115247 or International Patent Publication No. WO2013119877, each of which is herein incorporated by reference in their entirety.

[0598] In one embodiment, the virus-like particle (VLP) may be a self-assembled particle. Non-limiting examples of self-assembled VLPs and methods of making the self-assembled VLPs are described in International Patent Publication No. WO2013122262, the contents of which are herein incorporated by reference in its entirety.

### Minicells

[0599] In one aspect, the polynucleotides may be formulated in bacterial minicells. As a non-limiting example, bacterial minicells may be those described in International Publication No. WO2013088250 or US Patent Publication No. US20130177499, the contents of each of which are herein incorporated by reference in its entirety. The bacterial minicells comprising therapeutic agents such as polynucleotides described herein may be used to deliver the therapeutic agents to brain tumors.

### Semi-Solid Compositions

[0600] In one embodiment, the polynucleotides may be formulated with a hydrophobic matrix to form a semi-solid composition. As a non-limiting example, the semi-solid composition or paste-like composition may be made by the methods described in International Patent Publication No WO201307604, herein incorporated by reference in its entirety. The semi-solid composition may be a sustained release formulation as described in International Patent Publication No WO201307604, herein incorporated by reference in its entirety.

[0601] In another embodiment, the semi-solid composition may further have a micro-porous membrane or a biodegradable polymer formed around the composition (see e.g., International Patent Publication No WO201307604, herein incorporated by reference in its entirety).

[0602] The semi-solid composition using the polynucleotides of the present invention may have the characteristics of the semi-solid mixture as described in International Patent Publication No WO201307604, herein incorporated by reference in its entirety (e.g., a modulus of elasticity of at least 10⁻⁴ N·mm⁻², and/or a viscosity of at least 100mPa·s).

### Exosomes

[0603] In one embodiment, the polynucleotides may be formulated in exosomes. The exosomes may be loaded with at least one polynucleotide and delivered to cells, tissues and/or organisms. As a non-limiting example, the polynucleotides may be loaded in the exosomes described in International Publication No. WO2013084000, herein incorporated by reference in its entirety.

### Silk-Based Delivery

[0604] In one embodiment, the polynucleotides may be formulated in a sustained release silk-based delivery system. The silk-based delivery system may be formed by contacting a silk fibroin solution with a therapeutic agent such as, but not limited to, the polynucleotides described herein and/or known in the art. As a non-limiting example, the sustained release silk-based delivery system which may be used in the present invention and methods of making such system are described in US Patent Publication No. US20130177611, the contents of which are herein incorporated by reference in its entirety.

### Microparticles

[0605] In one embodiment, formulations comprising polynucleotides may comprise microparticles. The microparticles may comprise a polymer described herein and/or known in the art such as, but not limited to, poly(a-hydroxy acid), a polyhydroxy butyric acid, a polycaprolactone, a polyorthoester and a polyanhydride. The microparticle may have adsorbent surfaces to adsorb biologically active molecules such as polynucleotides. As a non-limiting example microparticles for use with the present invention and methods of making microparticles are described in US Patent Publication No. US2013195923 and US20130195898 and U.S. Pat. Nos. 8,309,139 and 8,206,749, the contents of each of which are herein incorporated by reference in its entirety.

[0606] In another embodiment, the formulation may be a microemulsion comprising microparticles and polynucleotides. As a non-limiting example, microemulsions comprising microparticles are described in US Patent Publication No. US2013195923 and US20130195898 and U.S. Pat. Nos. 8,309,139 and 8,206,749, the contents of each of which are herein incorporated by reference in its entirety.

### Amino Acid Lipids

[0607] In one embodiment, the polynucleotides may be formulated in amino acid lipids. Amino acid lipids are lipophilic compounds comprising an amino acid residue and one or more lipophilic tails. Non-limiting examples of amino acid lipids and methods of making amino acid lipids are described in U.S. Pat. No. 8,501,824, the contents of which are herein incorporated by reference in its entirety.

[0608] In one embodiment, the amino acid lipids have a hydrophilic portion and a lipophilic portion. The hydrophilic portion may be an amino acid residue and a lipophilic portion may comprise at least one lipophilic tail.

[0609] In one embodiment, the amino acid lipid formulations may be used to deliver the polynucleotides to a subject.

[0610] In another embodiment, the amino acid lipid formulations may deliver a polynucleotide in releasable form which comprises an amino acid lipid that binds and releases the polynucleotides. As a non-limiting example, the release of the polynucleotides may be provided by an acid-labile linker such as, but not limited to, those described in U.S. Pat. Nos. 7,098,032, 6,897,196, 6,426,086, 7,138,382, 5,563,250, and 5,505,931, the contents of each of which are herein incorporated by reference in its entirety.

### Microvesicles

[0611] In one embodiment, polynucleotides may be formulated in microvesicles. Non-limiting examples of microvesicles include those described in US Patent Publication No. US20130209544, the contents of which are herein incorporated by reference in its entirety.

[0612] In one embodiment, the microvesicle is an ARRDC1-mediated microvesicles (ARMMs). Non-limiting examples of ARMMs and methods of making ARMMs are described in International Patent Publication No. WO2013119602, the contents of which are herein incorporated by reference in its entirety.

### Interpolyelectrolyte Complexes

[0613] In one embodiment, the polynucleotides may be formulated in an interpolyelectrolyte complex. Interpolyelectrolyte complexes are formed when charge-dynamic polymers are complexed with one or more anionic molecules. Non-limiting examples of charge-dynamic polymers and interpolyelectrolyte complexes and methods of making interpolyelectrolyte complexes are described in U.S. Pat. No. 8,524,368, the contents of which is herein incorporated by reference in its entirety.

### Cyrstalline Polymeric Systems

[0614] In one embodiment, the polynucleotides may be formulated in crystalline polymeric systems. Crystalline polymeric systems are polymers with crystalline moieties and/or terminal units comprising crystalline moieties. Non-limiting examples of polymers with crystalline moieties and/or terminal units comprising crystalline moieties termed “CYC polymers,” crystalline polymer systems and methods of making such polymers and systems are described in U.S. Pat. No. 8,524,259, the contents of which are herein incorporated by reference in its entirety.

### Excipients

[0615] Pharmaceutical formulations may additionally comprise a pharmaceutically acceptable excipient, which, as used herein, includes, but are not limited to, any and all solvents, dispersion media, diluents, or other liquid vehicles, dispersion or suspension aids, surface active agents, isotonic agents, thickening or emulsifying agents, preservatives, solid binders, lubricants, flavoring agents, stabilizers, antioxidants, osmolality adjusting agents, pH adjusting agents and the like, as suited to the particular dosage form desired. Various excipients for formulating pharmaceutical compositions and techniques for preparing the composition are known in the art (see Remington: The Science and Practice of Pharmacy, 21^{st} Edition, A. R. Gennaro (Lippincott, Williams & Wilkins, Baltimore, Md., 2006; incorporated herein by reference in its entirety). The use of a conventional excipient medium may be contemplated within the scope of the present disclosure, except insofar as any conventional excipient medium is incompatible with a substance or its derivatives, such as by producing any undesirable biological effect or otherwise interacting in a deleterious manner with any other component(s) of the pharmaceutical composition, its use is contemplated to be within the scope of this invention.

[0616] In some embodiments, a pharmaceutically acceptable excipient may be at least 95%, at least 96%, at least 97%, at least 98%, at least 99%, or 100% pure. In some embodiments, an excipient is approved for use for humans and for veterinary use. In some embodiments, an excipient may be approved by United States Food and Drug Administration. In some embodiments, an excipient may be of pharmaceutical grade. In some embodiments, an excipient may meet the standards of the United States Pharmacopoeia (USP), the European Pharmacopoeia (EP), the British Pharmacopoeia, and/or the International Pharmacopoeia.

[0617] Pharmaceutically acceptable excipients used in the manufacture of pharmaceutical compositions include, but are not limited to, inert diluents, dispersing and/or granulating agents, surface active agents and/or emulsifiers, disintegrating agents, binding agents, preservatives, buffering agents, lubricating agents, and/or oils. Such excipients may optionally be included in pharmaceutical compositions. The composition may also include excipients such as cocoa butter and suppository waxes, coloring agents, coating agents, sweetening, flavoring, and/or perfuming agents.

[0618] Exemplary diluents include, but are not limited to, calcium carbonate, sodium carbonate, calcium phosphate, dicalcium phosphate, calcium sulfate, calcium hydrogen phosphate, sodium phosphate lactose, sucrose, cellulose, microcrystalline cellulose, kaolin, mannitol, sorbitol, inositol, sodium chloride, dry starch, cornstarch, powdered sugar, etc., and/or combinations thereof.

[0619] Exemplary granulating and/or dispersing agents include, but are not limited to, potato starch, corn starch, tapioca starch, sodium starch glycolate, clays, alginic acid, guar gum, citrus pulp, agar, bentonite, cellulose and wood products, natural sponge, cation-exchange resins, calcium carbonate, silicates, sodium carbonate, cross-linked poly(vinyl-pyrrolidone) (crospovidone), sodium carboxymethyl starch (sodium starch glycolate), carboxymethyl cellulose, cross-linked sodium carboxymethyl cellulose (croscarmellose), methylcellulose, pregelatinized starch (starch 1500), microcrystalline starch, water insoluble starch, calcium carboxymethyl cellulose, magnesium aluminum silicate (VEEGUM®), sodium lauryl sulfate, quaternary ammonium compounds, etc., and/or combinations thereof.

[0620] Exemplary surface active agents and/or emulsifiers include, but are not limited to, natural emulsifiers (e.g. acacia, agar, alginic acid, sodium alginate, tragacanth, chondrux, cholesterol, xanthan, pectin, gelatin, egg yolk, casein, wool fat, cholesterol, wax, and lecithin), colloidal clays (e.g. bentonite [aluminum silicate] and VEEGUM® [magnesium aluminum silicate]), long chain amino acid derivatives, high molecular weight alcohols (e.g. stearyl alcohol, cetyl alcohol, oleyl alcohol, triacetin monostearate, ethylene glycol distearate, glyceryl monostearate, and propylene glycol monostearate, polyvinyl alcohol), carbomers (e.g. carboxy polymethylene, polyacrylic acid, acrylic acid polymer, and carboxyvinyl polymer), carrageenan, cellulosic derivatives (e.g. carboxymethylcellulose sodium, powdered cellulose, hydroxymethyl cellulose, hydroxypropyl cellulose, hydroxypropyl methylcellulose, methylcellulose), sorbitan fatty acid esters (e.g. polyoxyethylene sorbitan monolaurate [TWEEN®20], polyoxyethylene sorbitan [TWEEN®60], polyoxyethylene sorbitan monooleate [TWEEN®80], sorbitan monopalmitate [SPAN®40], sorbitan monostearate [SPAN®60], sorbitan tristearate [SPAN®65], glyceryl monooleate, sorbitan monooleate [SPAN®80]), polyoxyethylene esters (e.g. polyoxyethylene monostearate [MYRJ®45], polyoxyethylene hydrogenated castor oil, polyethoxylated castor oil, polyoxymethylene stearate, and SOLUTOL®), sucrose fatty acid esters, polyethylene glycol fatty acid esters (e.g. CREMOPHOR®), polyoxyethylene ethers, (e.g. polyoxyethylene lauryl ether [BRIJ®30]), poly(vinyl-pyrrolidone), diethylene glycol monolaurate, triethanolamine oleate, sodium oleate, potassium oleate, ethyl oleate, oleic acid, ethyl laurate, sodium lauryl sulfate, PLUORINC®F 68, POLOXAMER® 188, cetrimonium bromide, cetylpyridinium chloride, benzalkonium chloride, docusate sodium, etc. and/or combinations thereof.

[0621] Exemplary binding agents include, but are not limited to, starch (e.g. cornstarch and starch paste); gelatin; sugars (e.g. sucrose, glucose, dextrose, dextrin, molasses, lactose, lactitol, mannitol); amino acids (e.g., glycine); natural and synthetic gums (e.g. acacia, sodium alginate, extract of Irish moss, panwar gum, ghatti gum, mucilage of isapol husks, carboxymethylcellulose, methylcellulose, ethylcellulose, hydroxyethylcellulose, hydroxypropyl cellulose, hydroxypropyl methylcellulose, microcrystalline cellulose, cellulose acetate, poly(vinyl-pyrrolidone), magnesium aluminum silicate (VEEGUM®), and larch arabogalactan); alginates; polyethylene oxide; polyethylene glycol; inorganic calcium salts; silicic acid; polymethacrylates; waxes; water; alcohol; etc.; and combinations thereof.

[0622] Exemplary preservatives may include, but are not limited to, antioxidants, chelating agents, antimicrobial preservatives, antifungal preservatives, alcohol preservatives, acidic preservatives, and/or other preservatives. Oxidation is a potential degradation pathway for mRNA, especially for liquid mRNA formulations. In order to prevent oxidation, antioxidants can be added to the formulation. Exemplary antioxidants include, but are not limited to, alpha tocopherol, ascorbic acid, acorbyl palmitate, benzyl alcohol, butylated hydroxyanisole, EDTA, m-cresol, methionine, butylated hydroxytoluene, monothioglycerol, potassium metabisulfite, propionic acid, propyl gallate, sodium ascorbate, sodium bisulfite, sodium metabisulfite, thioglycerol and/or sodium sulfite. Exemplary chelating agents include ethylenediaminetetraacetic acid (EDTA), citric acid monohydrate, disodium edetate, dipotassium edetate, edetic acid, fumaric acid, malic acid, phosphoric acid, sodium edetate, tartaric acid, and/or trisodium edetate. Exemplary antimicrobial preservatives include, but are not limited to, benzalkonium chloride, benzethonium chloride, benzyl alcohol, bronopol, cetrimide, cetylpyridinium chloride, chlorhexidine, chlorobutanol, chlorocresol, chloroxylenol, cresol, ethyl alcohol, glycerin, hexetidine, imidurea, phenol, phenoxyethanol, phenylethyl alcohol, phenylmercuric nitrate, propylene glycol, and/or thimerosal. Exemplary antifungal preservatives include, but are not limited to, butyl paraben, methyl paraben, ethyl paraben, propyl paraben, benzoic acid, hydroxybenzoic acid, potassium benzoate, potassium sorbate, sodium benzoate, sodium propionate, and/or sorbic acid. Exemplary alcohol preservatives include, but are not limited to, ethanol, polyethylene glycol, phenol, phenolic compounds, bisphenol, chlorobutanol, hydroxybenzoate, and/or phenylethyl alcohol. Exemplary acidic preservatives include, but are not limited to, vitamin A, vitamin C, vitamin E, beta-carotene, citric acid, acetic acid, dehydroacetic acid, ascorbic acid, sorbic acid, and/or phytic acid. Other preservatives include, but are not limited to, tocopherol, tocopherol acetate, deteroxime mesylate, cetrimide, butylated hydroxyanisol (BHA), butylated hydroxytoluened (BHT), ethylenediamine, sodium lauryl sulfate (SLS), sodium lauryl ether sulfate (SLES), sodium bisulfite, sodium metabisulfite, potassium sulfite, potassium metabisulfite, GLYDANT PLUS®, PHENONIP®, methylparaben, GERMALL®115, GERMABEN®II, NEOLONE™, KATHON™, and/or EUXYL®.

[0623] In some embodiments, the pH of polynucleotide solutions are maintained between pH 5 and pH 8 to improve stability. Exemplary buffers to control pH may include, but are not limited to sodium phosphate, sodium citrate, sodium succinate, histidine (or histidine-HCl), sodium carbonate, and/or sodium malate. In another embodiment, the exemplary buffers listed above may be used with additional monovalent counterions (including, but not limited to potassium). Divalent cations may also be used as buffer counterions; however, these are not preferred due to complex formation and/or mRNA degradation.

[0624] Exemplary buffering agents may also include, but are not limited to, citrate buffer solutions, acetate buffer solutions, phosphate buffer solutions, ammonium chloride, calcium carbonate, calcium chloride, calcium citrate, calcium glubionate, calcium gluceptate, calcium gluconate, D-gluconic acid, calcium glycerophosphate, calcium lactate, propanoic acid, calcium levulinate, pentanoic acid, dibasic calcium phosphate, phosphoric acid, tribasic calcium phosphate, calcium hydroxide phosphate, potassium acetate, potassium chloride, potassium gluconate, potassium mixtures, dibasic potassium phosphate, monobasic potassium phosphate, potassium phosphate mixtures, sodium acetate, sodium bicarbonate, sodium chloride, sodium citrate, sodium lactate, dibasic sodium phosphate, monobasic sodium phosphate, sodium phosphate mixtures, tromethamine, magnesium hydroxide, aluminum hydroxide, alginic acid, pyrogen-free water, isotonic saline, Ringer's solution, ethyl alcohol, etc., and/or combinations thereof.

[0625] Exemplary lubricating agents include, but are not limited to, magnesium stearate, calcium stearate, stearic acid, silica, talc, malt, glyceryl behanate, hydrogenated vegetable oils, polyethylene glycol, sodium benzoate, sodium acetate, sodium chloride, leucine, magnesium lauryl sulfate, sodium lauryl sulfate, etc., and combinations thereof.

[0626] Exemplary oils include, but are not limited to, almond, apricot kernel, avocado, babassu, bergamot, black current seed, borage, cade, camomile, canola, caraway, carnauba, castor, cinnamon, cocoa butter, coconut, cod liver, coffee, corn, cotton seed, emu, eucalyptus, evening primrose, fish, flaxseed, geraniol, gourd, grape seed, hazel nut, hyssop, isopropyl myristate, jojoba, kukui nut, lavandin, lavender, lemon, litsea cubeba, macademia nut, mallow, mango seed, meadowfoam seed, mink, nutmeg, olive, orange, orange roughy, palm, palm kernel, peach kernel, peanut, poppy seed, pumpkin seed, rapeseed, rice bran, rosemary, safflower, sandalwood, sasquana, savoury, sea buckthorn, sesame, shea butter, silicone, soybean, sunflower, tea tree, thistle, tsubaki, vetiver, walnut, and wheat germ oils. Exemplary oils include, but are not limited to, butyl stearate, caprylic triglyceride, capric triglyceride, cyclomethicone, diethyl sebacate, dimethicone 360, isopropyl myristate, mineral oil, octyldodecanol, oleyl alcohol, silicone oil, and/or combinations thereof.

[0627] Excipients such as cocoa butter and suppository waxes, coloring agents, coating agents, sweetening, flavoring, and/or perfuming agents can be present in the composition, according to the judgment of the formulator.

[0628] Exemplary additives include physiologically biocompatible buffers (e.g., trimethylamine hydrochloride), addition of chelants (such as, for example, DTPA or DTPA-bisamide) or calcium chelate complexes (as for example calcium DTPA, CaNaDTPA-bisamide), or, optionally, additions of calcium or sodium salts (for example, calcium chloride, calcium ascorbate, calcium gluconate or calcium lactate). In addition, antioxidants and suspending agents can be used.

Cryoprotectants for mRNA

[0629] In some embodiments, polynucleotide formulations may comprise cyroprotectants. As used herein, there term “cryoprotectant” refers to one or more agent that when combined with a given substance, helps to reduce or eliminate damage to that substance that occurs upon freezing. In some embodiments, cryoprotectants are combined with polynucleotides in order to stabilize them during freezing. Frozen storage of mRNA between −20° C. and −80° C. may be advantageous for long term (e.g. 36 months) stability of polynucleotide. In some embodiments, cryoprotectants are included in polynucleotide formulations to stabilize polynucleotide through freeze/thaw cycles and under frozen storage conditions. Cryoprotectants of the present invention may include, but are not limited to sucrose, trehalose, lactose, glycerol, dextrose, raffinose and/or mannitol. Trehalose is listed by the Food and Drug Administration as being generally regarded as safe (GRAS) and is commonly used in commercial pharmaceutical formulations.

### Bulking Agents

[0630] In some embodiments, polynucleotide formulations may comprise bulking agents. As used herein, the term “bulking agent” refers to one or more agents included in formulations to impart a desired consistency to the formulation and/or stabilization of formulation components. In some embodiments, bulking agents are included in lyophilized polynucleotide formulations to yield a “pharmaceutically elegant” cake, stabilizing the lyophilized polynucleotides during long term (e.g. 36 month) storage. Bulking agents of the present invention may include, but are not limited to sucrose, trehalose, mannitol, glycine, lactose and/or raffinose. In some embodiments, combinations of cryoprotectants and bulking agents (for example, sucrose/glycine or trehalose/mannitol) may be included to both stabilize polynucleotides during freezing and provide a bulking agent for lyophilization.

[0631] Non-limiting examples of formulations and methods for formulating the polynucleotides of the present invention are also provided in International Publication No WO2013090648 filed Dec. 14, 2012, the contents of which are incorporated herein by reference in their entirety.

### Inactive Ingredients

[0632] In some embodiments, polynucleotide formulations may comprise at least one excipient which is an inactive ingredient. As used herein, the term “inactive ingredient” refers to one or more inactive agents included in formulations. In some embodiments, all, none or some of the inactive ingredients which may be used in the formulations of the present invention may be approved by the US Food and Drug Administration (FDA). A non-exhaustive list of inactive ingredients and the routes of administration the inactive ingredients may be formulated in are described in Table 4 of co-pending International Application No. PCT/US2014/027077 (Attorney Docket No. M030).

### Delivery

[0633] The present disclosure encompasses the delivery of polynucleotides for any of therapeutic, pharmaceutical, diagnostic or imaging by any appropriate route taking into consideration likely advances in the sciences of drug delivery. Delivery may be naked or formulated.

### Naked Delivery

[0634] The polynucleotides of the present invention may be delivered to a cell naked. As used herein in, “naked” refers to delivering polynucleotides free from agents which promote transfection. For example, the polynucleotides delivered to the cell may contain no modifications. The naked polynucleotides may be delivered to the cell using routes of administration known in the art and described herein.

### Formulated Delivery

[0635] The polynucleotides of the present invention may be formulated, using the methods described herein. The formulations may contain polynucleotides which may be modified and/or unmodified. The formulations may further include, but are not limited to, cell penetration agents, a pharmaceutically acceptable carrier, a delivery agent, a bioerodible or biocompatible polymer, a solvent, and a sustained-release delivery depot. The formulated polynucleotides may be delivered to the cell using routes of administration known in the art and described herein.

[0636] The compositions may also be formulated for direct delivery to an organ or tissue in any of several ways in the art including, but not limited to, direct soaking or bathing, via a catheter, by gels, powder, ointments, creams, gels, lotions, and/or drops, by using substrates such as fabric or biodegradable materials coated or impregnated with the compositions, and the like.

### Administration

[0637] The polynucleotides of the present invention may be administered by any route which results in a therapeutically effective outcome. These include, but are not limited to enteral (into the intestine), gastroenteral, epidural (into the dura matter), oral (by way of the mouth), transdermal, peridural, intracerebral (into the cerebrum), intracerebroventricular (into the cerebral ventricles), epicutaneous (application onto the skin), intradermal, (into the skin itself), subcutaneous (under the skin), nasal administration (through the nose), intravenous (into a vein), intravenous bolus, intravenous drip, intraarterial (into an artery), intramuscular (into a muscle), intracardiac (into the heart), intraosseous infusion (into the bone marrow), intrathecal (into the spinal canal), intraperitoneal, (infusion or injection into the peritoneum), intravesical infusion, intravitreal, (through the eye), intracavernous injection (into a pathologic cavity) intracavitary (into the base of the penis), intravaginal administration, intrauterine, extra-amniotic administration, transdermal (diffusion through the intact skin for systemic distribution), transmucosal (diffusion through a mucous membrane), transvaginal, insufflation (snorting), sublingual, sublabial, enema, eye drops (onto the conjunctiva), in ear drops, auricular (in or by way of the ear), buccal (directed toward the cheek), conjunctival, cutaneous, dental (to a tooth or teeth), electro-osmosis, endocervical, endosinusial, endotracheal, extracorporeal, hemodialysis, infiltration, interstitial, intra-abdominal, intra-amniotic, intra-articular, intrabiliary, intrabronchial, intrabursal, intracartilaginous (within a cartilage), intracaudal (within the cauda equine), intracisternal (within the cisterna magna cerebellomedularis), intracorneal (within the cornea), dental intracornal, intracoronary (within the coronary arteries), intracorporus cavernosum (within the dilatable spaces of the corporus cavernosa of the penis), intradiscal (within a disc), intraductal (within a duct of a gland), intraduodenal (within the duodenum), intradural (within or beneath the dura), intraepidermal (to the epidermis), intraesophageal (to the esophagus), intragastric (within the stomach), intragingival (within the gingivae), intraileal (within the distal portion of the small intestine), intralesional (within or introduced directly to a localized lesion), intraluminal (within a lumen of a tube), intralymphatic (within the lymph), intramedullary (within the marrow cavity of a bone), intrameningeal (within the meninges), intraocular (within the eye), intraovarian (within the ovary), intrapericardial (within the pericardium), intrapleural (within the pleura), intraprostatic (within the prostate gland), intrapulmonary (within the lungs or its bronchi), intrasinal (within the nasal or periorbital sinuses), intraspinal (within the vertebral column), intrasynovial (within the synovial cavity of a joint), intratendinous (within a tendon), intratesticular (within the testicle), intrathecal (within the cerebrospinal fluid at any level of the cerebrospinal axis), intrathoracic (within the thorax), intratubular (within the tubules of an organ), intratumor (within a tumor), intratympanic (within the aurus media), intravascular (within a vessel or vessels), intraventricular (within a ventricle), iontophoresis (by means of electric current where ions of soluble salts migrate into the tissues of the body), irrigation (to bathe or flush open wounds or body cavities), laryngeal (directly upon the larynx), nasogastric (through the nose and into the stomach), occlusive dressing technique (topical route administration which is then covered by a dressing which occludes the area), ophthalmic (to the external eye), oropharyngeal (directly to the mouth and pharynx), parenteral, percutaneous, periarticular, peridural, perineural, periodontal, rectal, respiratory (within the respiratory tract by inhaling orally or nasally for local or systemic effect), retrobulbar (behind the pons or behind the eyeball), intramyocardial (entering the myocardium), soft tissue, subarachnoid, subconjunctival, submucosal, topical, transplacental (through or across the placenta), transtracheal (through the wall of the trachea), transtympanic (across or through the tympanic cavity), ureteral (to the ureter), urethral (to the urethra), vaginal, caudal block, diagnostic, nerve block, biliary perfusion, cardiac perfusion, photopheresis or spinal. In specific embodiments, compositions may be administered in a way which allows them cross the blood-brain barrier, vascular barrier, or other epithelial barrier. In one embodiment, a formulation for a route of administration may include at least one inactive ingredient. Non-limiting examples of routes of administration and inactive ingredients which may be included in formulations for the specific route of administration is shown in Table 9. In Table 9, “AN” means anesthetic, “CNBLK” means cervical nerve block, “NBLK” means nerve block, “IV” means intravenous, “IM” means intramuscular and “SC” means subcutaneous.

TABLE 9
Routes of Administration and Inactive Ingredients

| Route of Administration | Inactive Ingredient |
|---|---|
| Intrathecal (AN, CNBLK) | Acetone Sodium Bisulfite; Citric Acid; Hydrochloric Acid; Sodium |
| | Chloride; Sodium Hydroxide; Sodium Metabisulfite |
| Infiltration (AN) | Acetic Acid; Acetone Sodium Bisulfite; Ascorbic Acid; Benzyl |
| | Alcohol; Calcium Chloride; Carbon Dioxide; Chlorobutanol; Citric |
| | Acid; Citric Acid Monohydrate; Edetate Calcium Disodium; Edetate |
| | Disodium; Hydrochloric Acid; Hydrochloric Acid, Diluted; Lactic Acid; |
| | Methylparaben; Monothioglycerol; Nitrogen; Potassium Chloride; |
| | Potassium Metabisulfite; Potassium Phosphate, Monobasic; |
| | Propylparaben; Sodium Bisulfite; Sodium Carbonate; Sodium Chlorate; |
| | Sodium Chloride; Sodium Citrate; Sodium Hydroxide; Sodium Lactate; |
| | Sodium Metabisulfite; Sodium Phosphate, Dibasic, Heptahydrate |
| Sympathetic NBLK (AN) | Hydrochloric Acid; Sodium Chloride; Sodium Hydroxide |
| Auricular (Otic) | Acetic Acid; Aluminum Acetate; Aluminum Sulfate Anhydrous; |
| | Benzalkonium Chloride; Benzethonium Chloride; Benzyl Alcohol; |
| | Boric Acid; Calcium Carbonate; Cetyl Alcohol; Chlorobutanol; |
| | Chloroxylenol; Citric Acid; Creatinine; Cupric Sulfate; Cupric Sulfate |
| | Anhydrous; Edetate Disodium; Edetic Acid; Glycerin; Glyceryl |
| | Stearate; Hydrochloric Acid; Hydrocortisone; Hydroxyethyl Cellulose; |
| | Isopropyl Myristate; Lactic Acid; Lecithin, Hydrogenated; |
| | Methylparaben; Mineral Oil; Petrolatum; Petrolatum, White; |
| | Phenylethyl Alcohol; Polyoxyl 40 Stearate; Polyoxyl Stearate; |
| | Polysorbate 20; Polysorbate 80; Polyvinyl Alcohol; Potassium |
| | Metabisulfite; Potassium Phosphate, Monobasic; Povidone K90f; |
| | Povidones; Propylene Glycol; Propylene Glycol Diacetate; |
| | Propylparaben; Sodium Acetate; Sodium Bisulfite; Sodium Borate; |
| | Sodium Chloride; Sodium Citrate; Sodium Hydroxide; Sodium |
| | Phosphate, Dibasic, Anhydrous; Sodium Phosphate, Dibasic, |
| | Heptahydrate; Sodium Phosphate, Monobasic, Anhydrous; Sodium |
| | Sulfite; Sulfuric Acid; Thimerosal |
| Caudal Block | Ascorbic Acid; Calcium Chloride; Citric Acid; Edetate Calcium |
| | Disodium; Edetate Disodium; Hydrochloric Acid; Methylparaben; |
| | Monothioglycerol; Nitrogen; Potassium Chloride; Sodium Chloride; |
| | Sodium Hydroxide; Sodium Lactate; Sodium Metabisulfite |
| Dental | Acetone Sodium Bisulfite; Alcohol; Alcohol, Dehydrated; Alcohol, |
| | Denatured; Anethole; Benzyl Alcohol; Carboxymethylcellulose |
| | Sodium; Carrageenan; D&C Yellow No. 10; Dimethicone Medical |
| | Fluid 360; Eucalyptol; Fd&C Blue No. 1; Fd&C Green No. 3; Flavor |
| | 89-186; Flavor 89-259; Flavor Df-119; Flavor Df-1530; Flavor |
| | Enhancer; Gelatin; Gelatin, Crosslinked; Glycerin; Glyceryl Stearate; |
| | High Density Polyethylene; Hydrocarbon Gel, Plasticized; Hydrochloric |
| | Acid; Menthol; Mineral Oil; Nitrogen; Pectin; Peg-40 Sorbitan |
| | Diisostearate; Peppermint Oil; Petrolatum, White; Plastibase-50w; |
| | Polyethylene Glycol 1540; Polyglactin; Polyols; Polyoxyl 40 |
| | Hydrogenated Castor Oil; Polyoxyl 40 Stearate; Propylene Glycol; |
| | Pvm/Ma Copolymer; Saccharin Sodium; Silica, Dental; Silicon |
| | Dioxide; Sodium Benzoate; Sodium Chloride; Sodium Hydroxide; |
| | Sodium Lauryl Sulfate; Sodium Metabisulfite; Sorbitol; Titanium |
| | Dioxide |
| Diagnostic | Hydrochloric Acid |
| Endocervical | Colloidal Silicon Dioxide; Triacetin |
| Epidural | 1,2-Dioleoyl-Sn-Glycero-3-Phosphocholine; 1,2-Dipalmitoyl-Sn- |
| | Glycero-3-(Phospho-Rac-(1-Glycerol)); Ascorbic Acid; Benzyl |
| | Alcohol; Calcium Chloride; Cholesterol; Citric Acid; Edetate Calcium |
| | Disodium; Edetate Disodium; Glyceryl Trioleate; Hydrochloric Acid; |
| | Isotonic Sodium Chloride Solution; Methylparaben; Monothioglycerol; |
| | Nitrogen; Potassium Chloride; Sodium Bisulfite; Sodium Chloride; |
| | Sodium Citrate; Sodium Hydroxide; Sodium Lactate, L-; Sodium |
| | Metabisulfite; Sodium Sulfite; Sulfuric Acid; Tricaprylin |
| Extracorporeal | Acetic Acid; Alcohol, Dehydrated; Benzyl Alcohol; Hydrochloric Acid; |
| | Propylene Glycol; Sodium Acetate; Sodium Chloride; Sodium |
| | Hydroxide |
| Intramuscular-Intravenous | Acetic Acid; Alcohol; Alcohol, Dehydrated; Alcohol, Diluted; |
| | Anhydrous Dextrose; Anhydrous Lactose; Anhydrous Trisodium |
| | Citrate; Arginine; Ascorbic Acid; Benzethonium Chloride; Benzoic |
| | Acid; Benzyl Alcohol; Calcium Chloride; Carbon Dioxide; |
| | Chlorobutanol; Citric Acid; Citric Acid Monohydrate; Creatinine; |
| | Dextrose; Edetate Calcium Disodium; Edetate Disodium; Edetate |
| | Sodium; Gluconolactone; Glycerin; Hydrochloric Acid; Hydrochloric |
| | Acid, Diluted; Lactic Acid; Lactic Acid, Dl-; Lactose; Lactose |
| | Monohydrate; Lactose, Hydrous; Lysine; Mannitol; Methylparaben; |
| | Monothioglycerol; Niacinamide; Nitrogen; Phenol; Phenol, Liquefied; |
| | Phosphoric Acid; Polyethylene Glycol 300; Polyethylene Glycol 400; |
| | Polypropylene Glycol; Polysorbate 40; Potassium Metabisulfite; |
| | Potassium Phosphate, Monobasic; Propylene Glycol; Propylparaben; |
| | Saccharin Sodium; Saccharin Sodium Anhydrous; Silicone; |
| | Simethicone; Sodium Acetate; Sodium Acetate Anhydrous; Sodium |
| | Benzoate; Sodium Bicarbonate; Sodium Bisulfate; Sodium Bisulfite; |
| | Sodium Carbonate; Sodium Chloride; Sodium Citrate; Sodium |
| | Formaldehyde Sulfoxylate; Sodium Hydroxide; Sodium Lactate, L-; |
| | Sodium Metabisulfite; Sodium Phosphate; Sodium Phosphate, Dibasic; |
| | Sodium Phosphate, Dibasic, Anhydrous; Sodium Phosphate, Dibasic, |
| | Dihydrate; Sodium Phosphate, Dibasic, Heptahydrate; Sodium |
| | Phosphate, Monobasic; Sodium Phosphate, Monobasic, Anhydrous; |
| | Sodium Phosphate, Monobasic, Monohydrate; Sodium Sulfate; Sodium |
| | Sulfite; Sodium Tartrate; Sodium Thiomalate; Succinic Acid; Sulfuric |
| | Acid; Tartaric Acid, Dl-; Thimerosal; Trisodium Citrate Dihydrate; |
| | Tromethamine |
| Intramuscular-Intravenous- | Acetic Acid; Alcohol; Alcohol, Dehydrated; Benzyl Alcohol; |
| Subcutaneous | Chlorobutanol; Citric Acid; Citric Acid Monohydrate; Citric Acid, |
| | Hydrous; Creatinine; Dextrose; Edetate Disodium; Edetate Sodium; |
| | Gelatin; Glycerin; Glycine; Hydrochloric Acid; Hydrochloric Acid, |
| | Diluted; Lactic Acid; Lactose; Lactose Monohydrate; Metacresol; |
| | Methanesulfonic Acid; Methylparaben; Monothioglycerol; Nitrogen; |
| | Phenol; Phosphoric Acid; Polyoxyethylene Fatty Acid Esters; |
| | Propylparaben; Sodium Acetate; Sodium Bisulfate; Sodium Bisulfite; |
| | Sodium Chloride; Sodium Citrate; Sodium Dithionite; Sodium |
| | Hydroxide; Sodium Lactate; Sodium Lactate, L-; Sodium Metabisulfite; |
| | Sodium Phosphate, Dibasic, Heptahydrate; Thimerosal |
| Intramuscular - | Acetic Acid; Anhydrous Dextrose; Benzyl Alcohol; Chlorobutanol; |
| Subcutaneous | Citric Acid; Cysteine; Edetate Disodium; Gelatin; Glycerin; Glycine; |
| | Hydrochloric Acid; Lactose Monohydrate; Mannitol; Metacresol; |
| | Methylparaben; Nitrogen; Peg Vegetable Oil; Peg-40 Castor Oil; |
| | Phenol; Phenol, Liquefied; Phosphoric Acid; Polyoxyethylene Fatty |
| | Acid Esters; Polysorbate 20; Propylparaben; Protamine Sulfate; Sesame |
| | Oil; Sodium Acetate; Sodium Acetate Anhydrous; Sodium Chloride; |
| | Sodium Citrate; Sodium Formaldehyde Sulfoxylate; Sodium Hydroxide; |
| | Sodium Phosphate Dihydrate; Sodium Phosphate, Dibasic, |
| | Heptahydrate; Sulfuric Acid; Thimerosal; Zinc Chloride; Zinc Oxide |
| Implantation | Acetone; Crospovidone; Dimethylsiloxane/Methylvinylsiloxane |
| | Copolymer; Ethylene Vinyl Acetate Copolymer; Magnesium Stearate; |
| | Poly(Bis(P-Carboxyphenoxy)Propane Anhydride): Sebacic Acid; |
| | Polyglactin; Silastic Brand Medical Grade Tubing; Silastic Medical |
| | Adhesive, Silicone Type A; Stearic Acid |
| Infiltration | Cholesterol; Citric Acid; Diethyl Pyrocarbonate; |
| | Dipalmitoylphosphatidylglycerol, Dl-; Hydrochloric Acid; Nitrogen; |
| | Phosphoric Acid; Sodium Chloride; Sodium Hydroxide; Sodium |
| | Metabisulfite; Tricaprylin |
| Inhalation | Acetone Sodium Bisulfite; Acetylcysteine; Alcohol; Alcohol, |
| | Dehydrated; Ammonia; Ascorbic Acid; Benzalkonium Chloride; |
| | Carbon Dioxide; Cetylpyridinium Chloride; Chlorobutanol; Citric Acid; |
| | D&C Yellow No. 10; Dichlorodifluoromethane; |
| | Dichlorotetrafluoroethane; Edetate Disodium; Edetate Sodium; Fd&C |
| | Yellow No. 6; Fluorochlorohydrocarbons; Glycerin; Hydrochloric Acid; |
| | Hydrochloric Acid, Diluted; Lactose; Lecithin; Lecithin, Hydrogenated |
| | Soy; Lecithin, Soybean; Menthol; Methylparaben; Nitric Acid; |
| | Nitrogen; Norflurane; Oleic Acid; Propylene Glycol; Propylparaben; |
| | Saccharin; Saccharin Sodium; Sodium Bisulfate; Sodium Bisulfite; |
| | Sodium Chloride; Sodium Citrate; Sodium Hydroxide; Sodium |
| | Metabisulfite; Sodium Sulfate Anhydrous; Sodium Sulfite; Sorbitan |
| | Trioleate; Sulfuric Acid; Thymol; Trichloromonofluoromethane |
| Interstitial | Benzyl Alcohol; Dextrose; Hydrochloric Acid; Sodium Acetate; |
| | Sodium Hydroxide |
| Intra-amniotic | Citric Acid; Edetate Disodium Anhydrous; Hydrochloric Acid; Sodium |
| | Hydroxide |
| Intra-arterial | Anhydrous Trisodium Citrate; Benzyl Alcohol; Carbon Dioxide; Citric |
| | Acid; Diatrizoic Acid; Edetate Calcium Disodium; Edetate Disodium; |
| | Hydrochloric Acid; Hydrochloric Acid, Diluted; Iodine; Meglumine; |
| | Methylparaben; Nitrogen; Propylparaben; Sodium Bisulfite; Sodium |
| | Carbonate; Sodium Carbonate Monohydrate; Sodium Chloride; Sodium |
| | Citrate; Sodium Hydroxide; Tromethamine |
| Intra-articular | Acetic Acid; Anhydrous Trisodium Citrate; Benzalkonium Chloride; |
| | Benzyl Alcohol; Carboxymethylcellulose; Carboxymethylcellulose |
| | Sodium; Cellulose, Microcrystalline; Citric Acid; Creatine; Creatinine; |
| | Crospovidone; Diatrizoic Acid; Edetate Calcium Disodium; Edetate |
| | Disodium; Hyaluronate Sodium; Hydrochloric Acid; Iodine; |
| | Meglumine; Methylcelluloses; Methylparaben; Myristyl-.Gamma.- |
| | Picolinium Chloride; Niacinamide; Phenol; Phosphoric Acid; |
| | Polyethylene Glycol 3350; Polyethylene Glycol 4000; Polysorbate 80; |
| | Potassium Phosphate, Dibasic; Potassium Phosphate, Monobasic; |
| | Propylparaben; Sodium Acetate; Sodium Bisulfite; Sodium Chloride; |
| | Sodium Citrate; Sodium Hydroxide; Sodium Metabisulfite; Sodium |
| | Phosphate; Sodium Phosphate, Dibasic, Anhydrous; Sodium Phosphate, |
| | Dibasic, Heptahydrate; Sodium Phosphate, Monobasic, Anhydrous; |
| | Sodium Phosphate, Monobasic, Monohydrate; Sodium Sulfite; Sorbitol; |
| | Sorbitol Solution |
| Intrabursal | Anhydrous Trisodium Citrate; Benzalkonium Chloride; Benzyl Alcohol; |
| | Carboxymethylcellulose; Carboxymethylcellulose Sodium; Citric Acid; |
| | Creatinine; Edetate Disodium; Hydrochloric Acid; Methylparaben; |
| | Polysorbate 80; Propylparaben; Sodium Bisulfite; Sodium Chloride; |
| | Sodium Hydroxide; Sodium Metabisulfite; Sodium Phosphate; Sodium |
| | Phosphate, Dibasic, Heptahydrate; Sodium Phosphate, Monobasic, |
| | Anhydrous |
| Intracardiac | Carbon Dioxide; Citric Acid; Citric Acid Monohydrate; Diatrizoic Acid; |
| | Edetate Calcium Disodium; Edetate Disodium; Hydrochloric Acid; |
| | Iodine; Lactic Acid; Meglumine; Sodium Bisulfite; Sodium Carbonate |
| | Monohydrate; Sodium Chloride; Sodium Citrate; Sodium Hydroxide; |
| | Sodium Lactate; Sodium Lactate, L-; Sodium Metabisulfite |
| Intracaudal | Hydrochloric Acid; Sodium Chloride; Sodium Hydroxide |
| Intracavitary | Alcohol, Dehydrated; Alfadex; Anhydrous Lactose; Benzyl Alcohol; |
| | Dextrose; Hydrochloric Acid; Lactose; Lactose Monohydrate; Nitrogen; |
| | Sodium Acetate; Sodium Chloride; Sodium Citrate; Sodium Hydroxide |
| Intradermal | Benzalkonium Chloride; Benzyl Alcohol; Carboxymethylcellulose |
| | Sodium; Creatinine; Edetate Disodium; Glycerin; Hydrochloric Acid; |
| | Metacresol; Methylparaben; Phenol; Polysorbate 80; Protamine Sulfate; |
| | Sodium Acetate; Sodium Bisulfite; Sodium Chloride; Sodium |
| | Hydroxide; Sodium Phosphate; Sodium Phosphate, Dibasic; Sodium |
| | Phosphate, Dibasic, Heptahydrate; Sodium Phosphate, Monobasic, |
| | Anhydrous; Zinc Chloride |
| Intradiscal | Cysteine Hydrochloride Anhydrous; Cysteine, Dl-; Diatrizoic Acid; |
| | Edetate Calcium Disodium; Edetate Disodium; Iodine; Meglumine; |
| | Sodium Bisulfite; Sodium Hydroxide |
| Intralesional | Acetic Acid; Benzalkonium Chloride; Benzyl Alcohol; |
| | Carboxymethylcellulose; Carboxymethylcellulose Sodium; Citric Acid; |
| | Creatine; Creatinine; Edetate Disodium; Hydrochloric Acid; |
| | Methylcelluloses; Methylparaben; Myristyl-.Gamma.-Picolinium |
| | Chloride; Niacinamide; Phenol; Phosphoric Acid; Polyethylene Glycol |
| | 3350; Polyethylene Glycol 4000; Polysorbate 80; Propylparaben; |
| | Sodium Acetate; Sodium Bisulfite; Sodium Chloride; Sodium Citrate; |
| | Sodium Hydroxide; Sodium Phosphate; Sodium Phosphate, Dibasic; |
| | Sodium Phosphate, Dibasic, Anhydrous; Sodium Phosphate, Dibasic, |
| | Heptahydrate; Sodium Phosphate, Monobasic; Sodium Phosphate, |
| | Monobasic, Anhydrous; Sodium Phosphate, Monobasic, Monohydrate; |
| | Sodium Sulfite; Sorbitol; Sorbitol Solution |
| Intralymphatic | Poppy Seed Oil |
| Intramuscular | Acetic Acid; Activated Charcoal; Adipic Acid; Alcohol; Alcohol, |
| | Dehydrated; Ammonium Acetate; Anhydrous Dextrose; Ascorbic Acid; |
| | Benzalkonium Chloride; Benzethonium Chloride; Benzoic Acid; Benzyl |
| | Alcohol; Benzyl Benzoate; Butylated Hydroxyanisole; Butylated |
| | Hydroxytoluene; Butylparaben; Calcium; Calcium Chloride; Carbon |
| | Dioxide; Carboxymethylcellulose; Carboxymethylcellulose Sodium; |
| | Castor Oil; Cellulose, Microcrystalline; Chlorobutanol; Chlorobutanol |
| | Hemihydrate; Chlorobutanol, Anhydrous; Citric Acid; Citric Acid |
| | Monohydrate; Corn Oil; Cottonseed Oil; Creatine; Creatinine; |
| | Croscarmellose Sodium; Crospovidone; Dextrose; Diatrizoic Acid; |
| | Docusate Sodium; Edetate Calcium Disodium; Edetate Disodium; |
| | Edetate Disodium Anhydrous; Edetate Sodium; Ethyl Acetate; Gelatin; |
| | Glutathione; Glycerin; Glycine; Hyaluronate Sodium; Hydrochloric |
| | Acid; Hydroxide Ion; Lactic Acid; Lactic Acid, Dl-; Lactose; Lactose |
| | Monohydrate; Lactose, Hydrous; Lecithin; Magnesium Chloride; |
| | Maleic Acid; Mannitol; Meglumine; Metacresol; Methionine; |
| | Methylcelluloses; Methylparaben; Monothioglycerol; Myristyl- |
| | .Gamma.-Picolinium Chloride; N,N-Dimethylacetamide; Niacinamide; |
| | Nitrogen; Peanut Oil; Peg-20 Sorbitan Isostearate; Phenol; |
| | Phenylmercuric Nitrate; Phosphoric Acid; Polyethylene Glycol 200; |
| | Polyethylene Glycol 300; Polyethylene Glycol 3350; Polyethylene |
| | Glycol 4000; Polyglactin; Polylactide; Polysorbate 20; Polysorbate 40; |
| | Polysorbate 80; Polyvinyl Alcohol; Potassium Phosphate, Dibasic; |
| | Potassium Phosphate, Monobasic; Povidones; Propyl Gallate; Propylene |
| | Glycol; Propylparaben; Saccharin Sodium; Saccharin Sodium |
| | Anhydrous; Sesame Oil; Sodium Acetate; Sodium Acetate Anhydrous; |
| | Sodium Benzoate; Sodium Bicarbonate; Sodium Bisulfite; Sodium |
| | Carbonate; Sodium Chlorate; Sodium Chloride; Sodium Chloride |
| | Injection; Sodium Citrate; Sodium Formaldehyde Sulfoxylate; Sodium |
| | Hydroxide; Sodium Metabisulfite; Sodium Phosphate; Sodium |
| | Phosphate, Dibasic; Sodium Phosphate, Dibasic, Anhydrous; Sodium |
| | Phosphate, Dibasic, Heptahydrate; Sodium Phosphate, Monobasic; |
| | Sodium Phosphate, Monobasic, Anhydrous; Sodium Phosphate, |
| | Monobasic, Monohydrate; Sodium Sulfate Anhydrous; Sodium Sulfite; |
| | Sodium Tartrate; Sorbitan Monopalmitate; Sorbitol; Sorbitol Solution; |
| | Starch; Sucrose; Sulfobutylether .Beta.-Cyclodextrin; Sulfuric Acid; |
| | Sulfurous Acid; Tartaric Acid; Thimerosal; Tromantadine; |
| | Tromethamine; Urea |
| Intraocular | Benzalkonium Chloride; Calcium Chloride; Citric Acid Monohydrate; |
| | Hydrochloric Acid; Magnesium Chloride; Polyvinyl Alcohol; Potassium |
| | Chloride; Sodium Acetate; Sodium Chloride; Sodium Citrate; Sodium |
| | Hydroxide |
| Intraperitoneal | Benzyl Alcohol; Calcium Chloride; Dextrose; Edetate Calcium |
| | Disodium; Hydrochloric Acid; Magnesium Chloride; Sodium Acetate; |
| | Sodium Bicarbonate; Sodium Bisulfite; Sodium Carbonate; Sodium |
| | Chloride; Sodium Citrate; Sodium Hydroxide; Sodium Lactate; Sodium |
| | Metabisulfite; Sulfuric Acid |
| Intrapleural | Benzyl Alcohol; Citric Acid; Dextrose; Dichlorodifluoromethane; |
| | Hydrochloric Acid; Sodium Acetate; Sodium Carbonate; Sodium |
| | Chloride; Sodium Citrate; Sodium Hydroxide |
| Intraspinal | Dextrose; Hydrochloric Acid; Sodium Hydroxide |
| Intrasynovial | Acetic Acid; Benzyl Alcohol; Carboxymethylcellulose Sodium; Citric |
| | Acid; Creatinine; Edetate Disodium; Hydrochloric Acid; |
| | Methylcelluloses; Methylparaben; Myristyl-.Gamma.-Picolinium |
| | Chloride; Niacinamide; Phenol; Polyethylene Glycol 3350; |
| | Polyethylene Glycol 4000; Polysorbate 80; Propylparaben; Sodium |
| | Acetate; Sodium Bisulfite; Sodium Chloride; Sodium Citrate; Sodium |
| | Hydroxide; Sodium Phosphate, Dibasic; Sodium Phosphate, Dibasic, |
| | Heptahydrate; Sodium Phosphate, Monobasic; Sodium Phosphate, |
| | Monobasic, Anhydrous; Sorbitol |
| Intrathecal | Benzyl Alcohol; Carbon Dioxide; Citric Acid; Edetate Calcium |
| | Disodium; Hydrochloric Acid; Methionine; Nitrogen; Pentetate Calcium |
| | Trisodium; Pentetic Acid; Sodium Bicarbonate; Sodium Chloride; |
| | Sodium Citrate; Sodium Hydroxide; Sulfuric Acid; Tromethamine |
| Intratracheal | Acetic Acid; Benzyl Alcohol; Carboxymethylcellulose Sodium; |
| | Hydrochloric Acid; Isotonic Sodium Chloride Solution; Peanut Oil; |
| | Sodium Bicarbonate; Sodium Chloride; Sodium Citrate; Sodium |
| | Hydroxide; Tromethamine |
| Intratumor | Benzyl Alcohol; Hydrochloric Acid; Nitrogen; Sodium Carbonate; |
| | Sodium Chloride; Sodium Hydroxide |
| Intrauterine | Barium Sulfate; Crospovidone; Diatrizoic Acid; |
| | Dimethylsiloxane/Methylvinylsiloxane Copolymer; Edetate Calcium |
| | Disodium; Edetate Disodium; Ethylene Vinyl Acetate Copolymer; High |
| | Density Polyethylene; Meglumine; Polyethylene High Density |
| | Containing Ferric Oxide Black (<1%); Polyethylene Low Density |
| | Containing Barium Sulfate (20-24%); Polyethylene T; Polypropylene; |
| | Poppy Seed Oil; Potassium Phosphate, Monobasic; Silicone; Sodium |
| | Citrate; Sodium Hydroxide; Titanium Dioxide |
| Intravascular | Alcohol; Alcohol, Dehydrated; Calcium Chloride; Carbon Dioxide; |
| | Citric Acid; Diatrizoic Acid; Edetate Calcium Disodium; Edetate |
| | Disodium; Hydrochloric Acid; Hydrochloric Acid, Diluted; Iodine; |
| | Meglumine; Nitrogen; Potassium Hydroxide; Sodium Carbonate; |
| | Sodium Chloride; Sodium Citrate; Sodium Hydroxide; Sodium |
| | Phosphate, Monobasic, Anhydrous; Sodium Phosphate, Monobasic, |
| | Monohydrate; Tromethamine |
| Intravenous | Alpha-Tocopherol; Alpha-Tocopherol, Dl-; 1,2-Dimyristoyl-Sn- |
| | Glycero-3-Phosphocholine; 1,2-Distearoyl-Sn-Glycero-3-(Phospho- |
| | Rac-(1-Glycerol)); 1,2-Distearoyl-Sn-Glycero-3-Phosphocholine; |
| | Acetic Acid; Acetic Acid, Glacial; Acetic Anhydride; Acetylated |
| | Monoglycerides; Acetyltryptophan, Dl-; Activated Charcoal; Albumin |
| | Aggregated; Albumin Colloidal; Albumin Human; Alcohol; Alcohol, |
| | Dehydrated; Alcohol, Denatured; Ammonium Acetate; Ammonium |
| | Hydroxide; Ammonium Sulfate; Anhydrous Citric Acid; Anhydrous |
| | Dextrose; Anhydrous Lactose; Anhydrous Trisodium Citrate; Arginine; |
| | Ascorbic Acid; Benzenesulfonic Acid; Benzethonium Chloride; |
| | Benzoic Acid; Benzyl Alcohol; Benzyl Chloride; Bibapcitide; Boric |
| | Acid; Butylated Hydroxytoluene; Calcium Chloride; Calcium |
| | Gluceptate; Calcium Hydroxide; Calcobutrol; Caldiamide Sodium; |
| | Caloxetate Trisodium; Calteridol Calcium; Captisol; Carbon Dioxide; |
| | Cellulose, Microcrystalline; Chlorobutanol; Chlorobutanol |
| | Hemihydrate; Chlorobutanol, Anhydrous; Cholesterol; Citrate; Citric |
| | Acid; Citric Acid Monohydrate; Citric Acid, Hydrous; Cysteine; |
| | Cysteine Hydrochloride; Dalfampridine; Dextran; Dextran 40; |
| | Dextrose; Dextrose Monohydrate; Dextrose Solution; Diatrizoic Acid; |
| | Dimethicone Medical Fluid 360; Edetate Calcium Disodium; Edetate |
| | Disodium; Edetate Disodium Anhydrous; Egg Phospholipids; |
| | Ethanolamine Hydrochloride; Ethylenediamine; Exametazime; Ferric |
| | Chloride; Gadolinium Oxide; Gamma Cyclodextrin; Gelatin; Gentisic |
| | Acid; Gluceptate Sodium; Gluceptate Sodium Dihydrate; |
| | Gluconolactone; Glucuronic Acid; Glycerin; Glycine; Guanidine |
| | Hydrochloride; Hetastarch; Histidine; Human Albumin Microspheres; |
| | Hydrochloric Acid; Hydrochloric Acid, Diluted; |
| | Hydroxyethylpiperazine Ethane Sulfonic Acid; Hydroxypropyl- |
| | Bcyclodextrin; Iodine; Iodoxamic Acid; Iofetamine Hydrochloride; |
| | Isopropyl Alcohol; Isotonic Sodium Chloride Solution; Lactic Acid; |
| | Lactic Acid, Dl-; Lactic Acid, L-; Lactobionic Acid; Lactose; Lactose |
| | Monohydrate; Lactose, Hydrous; Lecithin, Egg; Lecithin, Hydrogenated |
| | Soy; Lidofenin; Mannitol; Mebrofenin; Medronate Disodium; Medronic |
| | Acid; Meglumine; Methionine; Methylboronic Acid; Methylene Blue; |
| | Methylparaben; Monothioglycerol; N-(Carbamoyl-Methoxy Peg-40)- |
| | 1,2-Distearoyl-Cephalin Sodium; N,N-Dimethylacetamide; Nioxime; |
| | Nitrogen; Octanoic Acid; Oxidronate Disodium; Oxyquinoline; |
| | Pentasodium Pentetate; Pentetate Calcium Trisodium; Pentetic Acid; |
| | Perflutren; Phenol; Phenol, Liquefied; Phosphatidyl Glycerol, Egg; |
| | Phospholipid, Egg; Phosphoric Acid; Poloxamer 188; Polyethylene |
| | Glycol 300; Polyethylene Glycol 400; Polyethylene Glycol 600; |
| | Polysiloxane; Polysorbate 20; Polysorbate 80; Potassium Bisulfite; |
| | Potassium Chloride; Potassium Hydroxide; Potassium Metabisulfite; |
| | Potassium Phosphate, Dibasic; Potassium Phosphate, Monobasic; |
| | Povidones; Propylene Glycol; Propylparaben; Saccharin Sodium; |
| | Sodium Acetate; Sodium Acetate Anhydrous; Sodium Ascorbate; |
| | Sodium Benzoate; Sodium Bicarbonate; Sodium Bisulfite; Sodium |
| | Carbonate; Sodium Carbonate Decahydrate; Sodium Carbonate |
| | Monohydrate; Sodium Chloride; Sodium Chloride Injection, |
| | Bacteriostatic; Sodium Citrate; Sodium Dithionite; Sodium Gluconate; |
| | Sodium Hydroxide; Sodium Iodide; Sodium Lactate; Sodium |
| | Metabisulfite; Sodium Phosphate; Sodium Phosphate, Dibasic; Sodium |
| | Phosphate, Dibasic, Anhydrous; Sodium Phosphate, Dibasic, Dihydrate; |
| | Sodium Phosphate, Dibasic, Heptahydrate; Sodium Phosphate, |
| | Monobasic, Anhydrous; Sodium Phosphate, Monobasic, Dihydrate; |
| | Sodium Phosphate, Monobasic, Monohydrate; Sodium Pyrophosphate; |
| | Sodium Succinate Hexahydrate; Sodium Sulfite; Sodium Tartrate; |
| | Sodium Thiosulfate; Sodium Thiosulfate Anhydrous; Sodium |
| | Trimetaphosphate; Sorbitol; Sorbitol Solution; Soybean Oil; Stannous |
| | Chloride; Stannous Chloride Anhydrous; Stannous Fluoride; Stannous |
| | Tartrate; Succimer; Succinic Acid; Sucrose; Sulfobutylether .Beta.- |
| | Cyclodextrin; Sulfuric Acid; Tartaric Acid; Tartaric Acid, Dl-; Tert- |
| | Butyl Alcohol; Tetrakis(2-Methoxyisobutylisocyanide)Copper(I) |
| | Tetrafluoroborate; Theophylline; Thimerosal; Threonine; Tin; |
| | Trisodium Citrate Dihydrate; Tromantadine; Tromethamine; |
| | Versetamide |
| Intravenous Bolus | Sodium Chloride |
| Intravesical | Alcohol, Dehydrated; Edetate Calcium Disodium; Hydrochloric Acid; |
| | Nitrogen; Polyoxyl 35 Castor Oil; Potassium Phosphate, Monobasic; |
| | Sodium Chloride; Sodium Hydroxide; Sodium Phosphate, Dibasic, |
| | Anhydrous; Sodium Phosphate, Monobasic, Anhydrous |
| Intravitreal | Calcium Chloride; Carboxymethylcellulose Sodium; Cellulose, |
| | Microcrystalline; Hyaluronate Sodium; Hydrochloric Acid; Magnesium |
| | Chloride; Magnesium Stearate; Polysorbate 80; Polyvinyl Alcohol; |
| | Potassium Chloride; Sodium Acetate; Sodium Bicarbonate; Sodium |
| | Carbonate; Sodium Chloride; Sodium Hydroxide; Sodium Phosphate, |
| | Dibasic, Heptahydrate; Sodium Phosphate, Monobasic, Monohydrate; |
| | Trisodium Citrate Dihydrate |
| Iontophoresis | Cetylpyridinium Chloride; Citric Acid; Edetate Disodium; Glycerin; |
| | Hydrochloric Acid; Methylparaben; Phenonip; Polacrilin; Polyvinyl |
| | Alcohol; Povidone Hydrogel; Sodium Bisulfite; Sodium Chloride; |
| | Sodium Citrate; Sodium Hydroxide; Sodium Metabisulfite; Sodium |
| | Phosphate, Monobasic |
| Irrigation | Acetic Acid; Activated Charcoal; Benzoic Acid; Hydrochloric Acid; |
| | Hypromelloses; Methylparaben; Nitrogen; Sodium Bisulfite; Sodium |
| | Citrate; Sodium Hydroxide; Sulfuric Acid |
| Intravenous - | Acetic Acid; Alcohol; Benzyl Alcohol; Calcium Hydroxide; |
| Subcutaneous | Chlorobutanol; Glycerin; Hydrochloric Acid; Lactose Monohydrate; |
| | Methylparaben; Nitrogen; Phenol; Phenol, Liquefied; Phosphoric Acid; |
| | Propylparaben; Sodium Acetate; Sodium Carbonate; Sodium Chloride; |
| | Sodium Hydroxide |
| Intravenous (Infusion) | 1,2-Dimyristoyl-Sn-Glycero-3-(Phospho-S-(1-Glycerol)); 1,2- |
| | Dimyristoyl-Sn-Glycero-3-Phosphocholine; Acetic Acid; Acetic Acid, |
| | Glacial; Activated Charcoal; Alanine; Albumin Human; Alcohol; |
| | Alcohol, Dehydrated; Ammonium Acetate; Anhydrous Citric Acid; |
| | Anhydrous Dextrose; Anhydrous Lactose; Anhydrous Trisodium |
| | Citrate; Arginine; Ascorbic Acid; Aspartic Acid; Benzenesulfonic Acid; |
| | Benzethonium Chloride; Benzoic Acid; Benzyl Alcohol; Brocrinat; |
| | Butylated Hydroxyanisole; Butylated Hydroxytoluene; Carbon Dioxide; |
| | Chlorobutanol; Citric Acid; Citric Acid Monohydrate; Citric Acid, |
| | Hydrous; Cysteine; Cysteine Hydrochloride; Deoxycholic Acid; |
| | Dextrose; Dextrose Solution; Diatrizoic Acid; Diethanolamine; |
| | Dimethyl Sulfoxide; Disodium Sulfosalicylate; Disofenin; Edetate |
| | Calcium Disodium; Edetate Disodium; Edetate Disodium Anhydrous; |
| | Edetate Sodium; Egg Phospholipids; Ethylenediamine; Fructose; |
| | Gelatin; Gentisic Acid Ethanolamide; Glycerin; Glycine; Histidine; |
| | Hydrochloric Acid; Hydrochloric Acid, Diluted; Hydroxide Ion; |
| | Hydroxypropyl-Bcyclodextrin; Isoleucine; Isotonic Sodium Chloride |
| | Solution; Lactic Acid; Lactic Acid, Dl-; Lactobionic Acid; Lactose; |
| | Lactose Monohydrate; Lactose, Hydrous; Leucine; Lysine; Lysine |
| | Acetate; Magnesium Chloride; Maleic Acid; Mannitol; Meglumine; |
| | Metacresol; Metaphosphoric Acid; Methanesulfonic Acid; Methionine; |
| | Methylparaben; Monothioglycerol; N,N-Dimethylacetamide; Nitric |
| | Acid; Nitrogen; Peg Vegetable Oil; Peg-40 Castor Oil; Peg-60 Castor |
| | Oil; Pentetate Calcium Trisodium; Phenol; Phenylalanine; |
| | Phospholipid; Phospholipid, Egg; Phosphoric Acid; Polyethylene |
| | Glycol 300; Polyethylene Glycol 400; Polyoxyl 35 Castor Oil; |
| | Polysorbate 20; Polysorbate 80; Potassium Chloride; Potassium |
| | Hydroxide; Potassium Metabisulfite; Potassium Phosphate, Dibasic; |
| | Potassium Phosphate, Monobasic; Povidones; Proline; Propylene |
| | Glycol; Propylparaben; Saccharin Sodium; Saccharin Sodium |
| | Anhydrous; Serine; Sodium Acetate; Sodium Acetate Anhydrous; |
| | Sodium Benzoate; Sodium Bicarbonate; Sodium Bisulfite; Sodium |
| | Carbonate; Sodium Chlorate; Sodium Chloride; Sodium Cholesteryl |
| | Sulfate; Sodium Citrate; Sodium Desoxycholate; Sodium Dithionite; |
| | Sodium Formaldehyde Sulfoxylate; Sodium Gluconate; Sodium |
| | Hydroxide; Sodium Hypochlorite; Sodium Lactate; Sodium Lactate, L-; |
| | Sodium Metabisulfite; Sodium Phosphate; Sodium Phosphate, Dibasic; |
| | Sodium Phosphate, Dibasic, Anhydrous; Sodium Phosphate, Dibasic, |
| | Dihydrate; Sodium Phosphate, Dibasic, Heptahydrate; Sodium |
| | Phosphate, Monobasic; Sodium Phosphate, Monobasic, Anhydrous; |
| | Sodium Phosphate, Monobasic, Dihydrate; Sodium Phosphate, |
| | Monobasic, Monohydrate; Sodium Sulfite; Sodium Tartrate; Sorbitol; |
| | Sorbitol Solution; Soybean Oil; Stannous Chloride; Stannous Chloride |
| | Anhydrous; Sterile Water For Inhalation; Sucrose; Sulfobutylether |
| | .Beta.-Cyclodextrin; Sulfur Dioxide; Sulfuric Acid; Tartaric Acid; |
| | Tartaric Acid, Dl-; Tert-Butyl Alcohol; Tetrofosmin; Theophylline; |
| | Threonine; Trifluoroacetic Acid; Trisodium Citrate Dihydrate; |
| | Tromethamine; Tryptophan; Tyrosine; Valine |
| Any Delivery Route | Alcohol; Benzyl Alcohol; Citric Acid Monohydrate; Gelfoam Sponge; |
| | Hydrochloric Acid; Methylparaben; Poly(Dl-Lactic-Co-Glycolic Acid), |
| | (50:50; Poly(Dl-Lactic-Co-Glycolic Acid), Ethyl Ester Terminated, |
| | (50:50; Polyquaternium-7 (70/30 Acrylamide/Dadmac; Propylene |
| | Glycol; Propylparaben; Sodium Chloride; Sodium Citrate; Sodium |
| | Hydroxide; Sodium Lactate; Sodium Phosphate, Monobasic, |
| | Monohydrate |
| Nasal | Acetic Acid; Alcohol, Dehydrated; Allyl .Alpha.-Ionone; Anhydrous |
| | Dextrose; Anhydrous Trisodium Citrate; Benzalkonium Chloride; |
| | Benzethonium Chloride; Benzyl Alcohol; Butylated Hydroxyanisole; |
| | Butylated Hydroxytoluene; Caffeine; Carbon Dioxide; |
| | Carboxymethylcellulose Sodium; Cellulose, Microcrystalline; |
| | Chlorobutanol; Citric Acid; Citric Acid Monohydrate; Dextrose; |
| | Dichlorodifluoromethane; Dichlorotetrafluoroethane; Edetate |
| | Disodium; Glycerin; Glycerol Ester Of Hydrogenated Rosin; |
| | Hydrochloric Acid; Hypromellose 2910 (15000 Mpa.S); |
| | Methylcelluloses; Methylparaben; Nitrogen; Norflurane; Oleic Acid; |
| | Petrolatum, White; Phenylethyl Alcohol; Polyethylene Glycol 3350; |
| | Polyethylene Glycol 400; Polyoxyl 400 Stearate; Polysorbate 20; |
| | Polysorbate 80; Potassium Phosphate, Monobasic; Potassium Sorbate; |
| | Propylene Glycol; Propylparaben; Sodium Acetate; Sodium Chloride; |
| | Sodium Citrate; Sodium Hydroxide; Sodium Phosphate; Sodium |
| | Phosphate, Dibasic; Sodium Phosphate, Dibasic, Anhydrous; Sodium |
| | Phosphate, Dibasic, Dihydrate; Sodium Phosphate, Dibasic, |
| | Dodecahydrate; Sodium Phosphate, Dibasic, Heptahydrate; Sodium |
| | Phosphate, Monobasic, Anhydrous; Sodium Phosphate, Monobasic, |
| | Dihydrate; Sorbitan Trioleate; Sorbitol; Sorbitol Solution; Sucralose; |
| | Sulfuric Acid; Trichloromonofluoromethane; Trisodium Citrate |
| | Dihydrate |
| Nerve Block | Acetic Acid; Acetone Sodium Bisulfite; Ascorbic Acid; Benzyl |
| | Alcohol; Calcium Chloride; Carbon Dioxide; Chlorobutanol; Citric |
| | Acid; Citric Acid Monohydrate; Edetate Calcium Disodium; Edetate |
| | Disodium; Hydrochloric Acid; Hydrochloric Acid, Diluted; Lactic Acid; |
| | Methylparaben; Monothioglycerol; Nitrogen; Potassium Chloride; |
| | Potassium Metabisulfite; Potassium Phosphate, Monobasic; |
| | Propylparaben; Sodium Bisulfite; Sodium Carbonate; Sodium Chlorate; |
| | Sodium Chloride; Sodium Citrate; Sodium Hydroxide; Sodium Lactate; |
| | Sodium Lactate, L-; Sodium Metabisulfite; Sodium Phosphate; Sodium |
| | Phosphate, Dibasic, Heptahydrate |
| Ophthalmic | Acetic Acid; Alcohol; Alcohol, Dehydrated; Alginic Acid; Amerchol- |
| | Cab; Ammonium Hydroxide; Anhydrous Trisodium Citrate; Antipyrine; |
| | Benzalkonium Chloride; Benzethonium Chloride; Benzododecinium |
| | Bromide; Boric Acid; Caffeine; Calcium Chloride; Carbomer 1342; |
| | Carbomer 934p; Carbomer 940; Carbomer Homopolymer Type B (Allyl |
| | Pentaerythritol Crosslinked); Carboxymethylcellulose Sodium; Castor |
| | Oil; Cetyl Alcohol; Chlorobutanol; Chlorobutanol, Anhydrous; |
| | Cholesterol; Citric Acid; Citric Acid Monohydrate; Creatinine; |
| | Diethanolamine; Diethylhexyl Phthalate **See Cder Guidance: |
| | Limiting The Use Of Certain Phthalates As Excipients In Cder- |
| | Regulated Products; Divinylbenzene Styrene Copolymer; Edetate |
| | Disodium; Edetate Disodium Anhydrous; Edetate Sodium; Ethylene |
| | Vinyl Acetate Copolymer; Gellan Gum (Low Acyl); Glycerin; Glyceryl |
| | Stearate; High Density Polyethylene; Hydrocarbon Gel, Plasticized; |
| | Hydrochloric Acid; Hydrochloric Acid, Diluted; Hydroxyethyl |
| | Cellulose; Hydroxypropyl Methylcellulose 2906; Hypromellose 2910 |
| | (15000 Mpa.S); Hypromelloses; Jelene; Lanolin; Lanolin Alcohols; |
| | Lanolin Anhydrous; Lanolin Nonionic Derivatives; Lauralkonium |
| | Chloride; Lauroyl Sarcosine; Light Mineral Oil; Magnesium Chloride; |
| | Mannitol; Methylcellulose (4000 Mpa.S); Methylcelluloses; |
| | Methylparaben; Mineral Oil; Nitric Acid; Nitrogen; Nonoxynol-9; |
| | Octoxynol-40; Octylphenol Polymethylene; Petrolatum; Petrolatum, |
| | White; Phenylethyl Alcohol; Phenylmercuric Acetate; Phenylmercuric |
| | Nitrate; Phosphoric Acid; Polidronium Chloride; Poloxamer 188; |
| | Poloxamer 407; Polycarbophil; Polyethylene Glycol 300; Polyethylene |
| | Glycol 400; Polyethylene Glycol 8000; Polyoxyethylene- |
| | Polyoxypropylene 1800; Polyoxyl 35 Castor Oil; Polyoxyl 40 |
| | Hydrogenated Castor Oil; Polyoxyl 40 Stearate; Polypropylene Glycol; |
| | Polysorbate 20; Polysorbate 60; Polysorbate 80; Polyvinyl Alcohol; |
| | Potassium Acetate; Potassium Chloride; Potassium Phosphate, |
| | Monobasic; Potassium Sorbate; Povidone K29/32; Povidone K30; |
| | Povidone K90; Povidones; Propylene Glycol; Propylparaben; Soda Ash; |
| | Sodium Acetate; Sodium Bisulfate; Sodium Bisulfite; Sodium Borate; |
| | Sodium Borate Decahydrate; Sodium Carbonate; Sodium Carbonate |
| | Monohydrate; Sodium Chloride; Sodium Citrate; Sodium Hydroxide; |
| | Sodium Metabisulfite; Sodium Nitrate; Sodium Phosphate; Sodium |
| | Phosphate Dihydrate; Sodium Phosphate, Dibasic; Sodium Phosphate, |
| | Dibasic, Anhydrous; Sodium Phosphate, Dibasic, Dihydrate; Sodium |
| | Phosphate, Dibasic, Heptahydrate; Sodium Phosphate, Monobasic; |
| | Sodium Phosphate, Monobasic, Anhydrous; Sodium Phosphate, |
| | Monobasic, Dihydrate; Sodium Phosphate, Monobasic, Monohydrate; |
| | Sodium Sulfate; Sodium Sulfate Anhydrous; Sodium Sulfate |
| | Decahydrate; Sodium Sulfite; Sodium Thiosulfate; Sorbic Acid; |
| | Sorbitan Monolaurate; Sorbitol; Sorbitol Solution; Stabilized Oxychloro |
| | Complex; Sulfuric Acid; Thimerosal; Titanium Dioxide; |
| | Tocophersolan; Trisodium Citrate Dihydrate; Triton 720; |
| | Tromethamine; Tyloxapol; Zinc Chloride |
| Parenteral | Hydrochloric Acid; Mannitol; Nitrogen; Sodium Acetate; Sodium |
| | Chloride; Sodium Hydroxide |
| Percutaneous | Duro-Tak 87-2287; Silicone Adhesive 4102 |
| Perfusion, Biliary | Glycerin |
| Perfusion, Cardiac | Hydrochloric Acid; Sodium Hydroxide |
| Periarticular | Diatrizoic Acid; Edetate Calcium Disodium; Iodine; Meglumine |
| Peridural | Citric Acid; Hydrochloric Acid; Methylparaben; Sodium Chloride; |
| | Sodium Hydroxide; Sodium Metabisulfite |
| Perineural | Hydrochloric Acid; Sodium Chloride; Sodium Hydroxide |
| Periodontal | Ethylene Vinyl Acetate Copolymer; Hydrochloric Acid; Methyl |
| | Pyrrolidone; Poloxamer 188; Poloxamer 407; Polylactide |
| Photopheresis | Acetic Acid; Alcohol, Dehydrated; Propylene Glycol; Sodium Acetate; |
| | Sodium Chloride; Sodium Hydroxide |
| Rectal | Alcohol; Alcohol, Dehydrated; Aluminum Subacetate; Anhydrous |
| | Citric Acid; Aniseed Oil; Ascorbic Acid; Ascorbyl Palmitate; Balsam |
| | Peru; Benzoic Acid; Benzyl Alcohol; Bismuth Subgallate; Butylated |
| | Hydroxyanisole; Butylated Hydroxytoluene; Butylparaben; Caramel; |
| | Carbomer 934; Carbomer 934p; Carboxypolymethylene; Cerasynt-Se; |
| | Cetyl Alcohol; Cocoa Butter; Coconut Oil, Hydrogenated; Coconut |
| | Oil/Palm Kernel Oil Glycerides, Hydrogenated; Cola Nitida Seed |
| | Extract; D&C Yellow No. 10; Dichlorodifluoromethane; |
| | Dichlorotetrafluoroethane; Dimethyldioctadecylammonium Bentonite; |
| | Edetate Calcium Disodium; Edetate Disodium; Edetic Acid; Epilactose; |
| | Ethylenediamine; Fat, Edible; Fat, Hard; Fd&C Blue No. 1; Fd&C |
| | Green No. 3; Fd&C Yellow No. 6; Flavor Fig 827118; Flavor |
| | Raspberry Pfc-8407; Fructose; Galactose; Glycerin; Glyceryl Palmitate; |
| | Glyceryl Stearate; Glyceryl Stearate/Peg Stearate; Glyceryl |
| | Stearate/Peg-40 Stearate; Glycine; Hydrocarbon; Hydrochloric Acid; |
| | Hydrogenated Palm Oil; Hypromelloses; Lactose; Lanolin; Lecithin; |
| | Light Mineral Oil; Magnesium Aluminum Silicate; Magnesium |
| | Aluminum Silicate Hydrate; Methylparaben; Nitrogen; Palm Kernel |
| | Oil; Paraffin; Petrolatum, White; Polyethylene Glycol 1000; |
| | Polyethylene Glycol 1540; Polyethylene Glycol 3350; Polyethylene |
| | Glycol 400; Polyethylene Glycol 4000; Polyethylene Glycol 6000; |
| | Polyethylene Glycol 8000; Polysorbate 60; Polysorbate 80; Potassium |
| | Acetate; Potassium Metabisulfite; Propylene Glycol; Propylparaben; |
| | Saccharin Sodium; Saccharin Sodium Anhydrous; Silicon Dioxide, |
| | Colloidal; Simethicone; Sodium Benzoate; Sodium Carbonate; Sodium |
| | Chloride; Sodium Citrate; Sodium Hydroxide; Sodium Metabisulfite; |
| | Sorbitan Monooleate; Sorbitan Sesquioleate; Sorbitol; Sorbitol Solution; |
| | Starch; Steareth-10; Steareth-40; Sucrose; Tagatose, D-; Tartaric Acid, |
| | Dl-; Trolamine; Tromethamine; Vegetable Oil Glyceride, |
| | Hydrogenated; Vegetable Oil, Hydrogenated; Wax, Emulsifying; White |
| | Wax; Xanthan Gum; Zinc Oxide |
| Respiratory (Inhalation) | Alcohol; Alcohol, Dehydrated; Apaflurane; Benzalkonium Chloride; |
| | Calcium Carbonate; Edetate Disodium; Gelatin; Glycine; Hydrochloric |
| | Acid; Lactose Monohydrate; Lysine Monohydrate; Mannitol; |
| | Norflurane; Oleic Acid; Polyethylene Glycol 1000; Povidone K25; |
| | Silicon Dioxide, Colloidal; Sodium Chloride; Sodium Citrate; Sodium |
| | Hydroxide; Sodium Lauryl Sulfate; Sulfuric Acid; Titanium Dioxide; |
| | Tromethamine; Zinc Oxide |
| Retrobulbar | Hydrochloric Acid; Sodium Hydroxide |
| Soft Tissue | Acetic Acid; Anhydrous Trisodium Citrate; Benzyl Alcohol; |
| | Carboxymethylcellulose; Carboxymethylcellulose Sodium; Citric Acid; |
| | Creatinine; Edetate Disodium; Hydrochloric Acid; Methylcelluloses; |
| | Methylparaben; Myristyl-.Gamma.-Picolinium Chloride; Phenol; |
| | Phosphoric Acid; Polyethylene Glycol 3350; Polyethylene Glycol 4000; |
| | Polysorbate 80; Propylparaben; Sodium Acetate; Sodium Bisulfite; |
| | Sodium Chloride; Sodium Citrate; Sodium Hydroxide; Sodium |
| | Phosphate; Sodium Phosphate, Dibasic; Sodium Phosphate, Dibasic, |
| | Heptahydrate; Sodium Phosphate, Monobasic; Sodium Phosphate, |
| | Monobasic, Anhydrous; Sodium Sulfite |
| Spinal | Anhydrous Dextrose; Dextrose; Hydrochloric Acid; Sodium Hydroxide |
| Subarachnoid | Hydrochloric Acid; Sodium Chloride; Sodium Hydroxide |
| Subconjunctival | Benzyl Alcohol; Hydrochloric Acid; Sodium Hydroxide |
| Subcutaneous | Acetic Acid; Acetic Acid, Glacial; Albumin Human; Ammonium |
| | Hydroxide; Ascorbic Acid; Benzyl Alcohol; Calcium Chloride; |
| | Carboxymethylcellulose Sodium; Chlorobutanol; Cresol; Diatrizoic |
| | Acid; Dimethyl Sulfoxide; Edetate Calcium Disodium; Edetate |
| | Disodium; Ethylene Vinyl Acetate Copolymer; Glycerin; Glycine; |
| | Glycine Hydrochloride; Histidine; Hydrochloric Acid; Lactic Acid; |
| | Lactic Acid, L-; Lactose; Magnesium Chloride; Magnesium Stearate; |
| | Mannitol; Metacresol; Methanesulfonic Acid; Methionine; Methyl |
| | Pyrrolidone; Methylparaben; Nitrogen; Phenol; Phenol, Liquefied; |
| | Phosphoric Acid; Poloxamer 188; Polyethylene Glycol 3350; |
| | Polyglactin; Polysorbate 20; Polysorbate 80; Potassium Phosphate, |
| | Dibasic; Potassium Phosphate, Monobasic; Povidone K17; Povidones; |
| | Propylene Glycol; Propylparaben; Protamine Sulfate; Sodium Acetate; |
| | Sodium Acetate Anhydrous; Sodium Bicarbonate; Sodium Bisulfite; |
| | Sodium Chloride; Sodium Citrate; Sodium Hydroxide; Sodium |
| | Metabisulfite; Sodium Phosphate; Sodium Phosphate Dihydrate; |
| | Sodium Phosphate, Dibasic; Sodium Phosphate, Dibasic, Anhydrous; |
| | Sodium Phosphate, Dibasic, Dihydrate; Sodium Phosphate, Dibasic, |
| | Heptahydrate; Sodium Phosphate, Monobasic; Sodium Phosphate, |
| | Monobasic, Anhydrous; Sodium Phosphate, Monobasic, Dihydrate; |
| | Sodium Phosphate, Monobasic, Monohydrate; Sodium Sulfite; Sodium |
| | Thioglycolate; Stearic Acid; Sucrose; Thimerosal; Tromethamine; Zinc; |
| | Zinc Acetate; Zinc Carbonate; Zinc Chloride; Zinc Oxide |
| Sublingual | Alcohol, Dehydrated |
| Submucosal | Acetic Acid; Edetic Acid; Mannitol; Nitrogen; Sodium Acetate; Sodium |
| | Chloride; Sodium Hydroxide; Sodium Metabisulfite |
| Topical | .Alpha.-Terpineol; .Alpha.-Tocopherol; .Alpha.-Tocopherol Acetate, |
| | Dl-; .Alpha.-Tocopherol, Dl-; 1,2,6-Hexanetriol; 1-O-Tolylbiguanide; 2- |
| | Ethyl-1,6-Hexanediol; Acetic Acid; Acetone; Acetylated Lanolin |
| | Alcohols; Acrylates Copolymer; Adhesive Tape; Alcohol; Alcohol, |
| | Dehydrated; Alcohol, Denatured; Alcohol, Diluted; Alkyl Ammonium |
| | Sulfonic Acid Betaine; Alkyl Aryl Sodium Sulfonate; Allantoin; |
| | Almond Oil; Aluminum Acetate; Aluminum Chlorhydroxy |
| | Allantoinate; Aluminum Hydroxide; Aluminum Hydroxide-Sucrose, |
| | Hydrated; Aluminum Hydroxide Gel; Aluminum Hydroxide Gel F 500; |
| | Aluminum Hydroxide Gel F 5000; Aluminum Monostearate; Aluminum |
| | Oxide; Aluminum Silicate; Aluminum Starch Octenylsuccinate; |
| | Aluminum Stearate; Aluminum Sulfate Anhydrous; Amerchol C; |
| | Amerchol-Cab; Aminomethylpropanol; Ammonia Solution; Ammonia |
| | Solution, Strong; Ammonium Hydroxide; Ammonium Lauryl Sulfate; |
| | Ammonium Nonoxynol-4 Sulfate; Ammonium Salt Of C-12-C-15 |
| | Linear Primary Alcohol Ethoxylate; Ammonyx; Amphoteric-2; |
| | Amphoteric-9; Anhydrous Citric Acid; Anhydrous Trisodium Citrate; |
| | Anoxid Sbn; Antifoam; Apricot Kernel Oil Peg-6 Esters; Aquaphor; |
| | Arlacel; Ascorbic Acid; Ascorbyl Palmitate; Beeswax; Beeswax, |
| | Synthetic; Beheneth-10; Bentonite; Benzalkonium Chloride; Benzoic |
| | Acid; Benzyl Alcohol; Betadex; Boric Acid; Butane; Butyl Alcohol; |
| | Butyl Ester Of Vinyl Methyl Ether/Maleic Anhydride Copolymer |
| | (125000 Mw); Butyl Stearate; Butylated Hydroxyanisole; Butylated |
| | Hydroxytoluene; Butylene Glycol; Butylparaben; C20-40 Pareth-24; |
| | Calcium Chloride; Calcium Hydroxide; Canada Balsam; |
| | Caprylic/Capric Triglyceride; Caprylic/Capric/Stearic Triglyceride; |
| | Captan; Caramel; Carbomer 1342; Carbomer 1382; Carbomer 934; |
| | Carbomer 934p; Carbomer 940; Carbomer 941; Carbomer 980; |
| | Carbomer 981; Carbomer Homopolymer Type B (Allyl Pentaerythritol |
| | Crosslinked); Carbomer Homopolymer Type C (Allyl Pentaerythritol |
| | Crosslinked); Carboxy Vinyl Copolymer; Carboxymethylcellulose; |
| | Carboxymethylcellulose Sodium; Carboxypolymethylene; Carrageenan; |
| | Carrageenan Salt; Castor Oil; Cedar Leaf Oil; Cellulose; Cerasynt-Se; |
| | Ceresin; Ceteareth-12; Ceteareth-15; Ceteareth-30; Cetearyl |
| | Alcohol/Ceteareth-20; Cetearyl Ethylhexanoate; Ceteth-10; Ceteth-2; |
| | Ceteth-20; Ceteth-23; Cetostearyl Alcohol; Cetrimonium Chloride; |
| | Cetyl Alcohol; Cetyl Esters Wax; Cetyl Palmitate; Chlorobutanol; |
| | Chlorocresol; Chloroxylenol; Cholesterol; Choleth-24; Citric Acid; |
| | Citric Acid Monohydrate; Cocamide Ether Sulfate; Cocamine Oxide; |
| | Coco Betaine; Coco Diethanolamide; Coco Monoethanolamide; Cocoa |
| | Butter; Coco-Glycerides; Coconut Oil; Cocoyl Caprylocaprate; |
| | Collagen; Coloring Suspension; Cream Base; Creatinine; Crospovidone; |
| | Cyclomethicone; Cyclomethicone/Dimethicone Copolyol; D&C Red |
| | No. 28; D&C Red No. 33; D&C Red No. 36; D&C Red No. 39; D&C |
| | Yellow No. 10; Decyl Methyl Sulfoxide; Dehydag Wax Sx; |
| | Dehydroacetic Acid; Dehymuls E; Denatonium Benzoate; Dextrin; |
| | Diazolidinyl Urea; Dichlorobenzyl Alcohol; Dichlorodifluoromethane; |
| | Dichlorotetrafluoroethane; Diethanolamine; Diethyl Sebacate; |
| | Diethylene Glycol Monoethyl Ether; Dihydroxyaluminum |
| | Aminoacetate; Diisopropanolamine; Diisopropyl Adipate; Diisopropyl |
| | Dilinoleate; Dimethicone 350; Dimethicone Copolyol; Dimethicone |
| | Medical Fluid 360; Dimethyl Isosorbide; Dimethyl Sulfoxide; Dinoseb |
| | Ammonium Salt; Disodium Cocoamphodiacetate; Disodium Laureth |
| | Sulfosuccinate; Disodium Lauryl Sulfosuccinate; Dmdm Hydantoin; |
| | Docosanol; Docusate Sodium; Edetate Disodium; Edetate Sodium; |
| | Edetic Acid; Entsufon; Entsufon Sodium; Epitetracycline |
| | Hydrochloride; Essence Bouquet 9200; Ethyl Acetate; Ethylcelluloses; |
| | Ethylene Glycol; Ethylenediamine; Ethylenediamine Dihydrochloride; |
| | Ethylhexyl Hydroxystearate; Ethylparaben; Fatty Acid Pentaerythriol |
| | Ester; Fatty Acids; Fatty Alcohol Citrate; Fd&C Blue No. 1; Fd&C Red |
| | No. 4; Fd&C Red No. 40; Fd&C Yellow No. 10 (Delisted); Fd&C |
| | Yellow No. 5; Fd&C Yellow No. 6; Ferric Oxide; Flavor Rhodia |
| | Pharmaceutical No. Rf 451; Formaldehyde; Formaldehyde Solution; |
| | Fractionated Coconut Oil; Fragrance 3949-5; Fragrance 520a; Fragrance |
| | 6.007; Fragrance 91-122; Fragrance 9128-Y; Fragrance 93498g; |
| | Fragrance Balsam Pine No. 5124; Fragrance Bouquet 10328; Fragrance |
| | Chemoderm 6401-B; Fragrance Chemoderm 6411; Fragrance Cream |
| | No. 73457; Fragrance Cs-28197; Fragrance Felton 066m; Fragrance |
| | Firmenich 47373; Fragrance Givaudan Ess 9090/1c; Fragrance H-6540; |
| | Fragrance Herbal 10396; Fragrance Nj-1085; Fragrance P O Fl-147; |
| | Fragrance Pa 52805; Fragrance Pera Derm D; Fragrance Rbd-9819; |
| | Fragrance Shaw Mudge U-7776; Fragrance Tf 044078; Fragrance |
| | Ungerer Honeysuckle K 2771; Fragrance Ungerer N5195; Gelatin; |
| | Gluconolactone; Glycerin; Glyceryl Citrate; Glyceryl Isostearate; |
| | Glyceryl Monostearate; Glyceryl Oleate; Glyceryl Oleate/Propylene |
| | Glycol; Glyceryl Palmitate; Glyceryl Ricinoleate; Glyceryl Stearate; |
| | Glyceryl Stearate-Laureth-23; Glyceryl Stearate/Peg-100 Stearate; |
| | Glyceryl Stearate-Stearamidoethyl Diethylamine; Glycol Distearate; |
| | Glycol Stearate; Guar Gum; Hair Conditioner (18n195-1m); Hexylene |
| | Glycol; High Density Polyethylene; Hyaluronate Sodium; Hydrocarbon |
| | Gel, Plasticized; Hydrochloric Acid; Hydrochloric Acid, Diluted; |
| | Hydrogen Peroxide; Hydrogenated Castor Oil; Hydrogenated |
| | Palm/Palm Kernel Oil Peg-6 Esters; Hydroxyethyl Cellulose; |
| | Hydroxymethyl Cellulose; Hydroxyoctacosanyl Hydroxystearate; |
| | Hydroxypropyl Cellulose; Hypromelloses; Imidurea; Irish Moss |
| | Extract; Isobutane; Isoceteth-20; Isooctyl Acrylate; Isopropyl Alcohol; |
| | Isopropyl Isostearate; Isopropyl Myristate; Isopropyl Myristate- |
| | Myristyl Alcohol; Isopropyl Palmitate; Isopropyl Stearate; Isostearic |
| | Acid; Isostearyl Alcohol; Jelene; Kaolin; Kathon Cg; Kathon Cg Ii; |
| | Lactate; Lactic Acid; Lactic Acid, Dl-; Laneth; Lanolin; Lanolin |
| | Alcohol-Mineral Oil; Lanolin Alcohols; Lanolin Anhydrous; Lanolin |
| | Cholesterols; Lanolin, Ethoxylated; Lanolin, Hydrogenated; Lauramine |
| | Oxide; Laurdimonium Hydrolyzed Animal Collagen; Laureth Sulfate; |
| | Laureth-2; Laureth-23; Laureth-4; Lauric Diethanolamide; Lauric |
| | Myristic Diethanolamide; Lauryl Sulfate; Lavandula Angustifolia |
| | Flowering Top; Lecithin; Lecithin Unbleached; Lemon Oil; Light |
| | Mineral Oil; Light Mineral Oil (85 Ssu); Limonene, (+/−)-; Lipocol Sc- |
| | 15; Magnesium Aluminum Silicate; Magnesium Aluminum Silicate |
| | Hydrate; Magnesium Nitrate; Magnesium Stearate; Mannitol; Maprofix; |
| | Medical Antiform A-F Emulsion; Menthol; Methyl Gluceth-10; Methyl |
| | Gluceth-20; Methyl Gluceth-20 Sesquistearate; Methyl Glucose |
| | Sesquistearate; Methyl Salicylate; Methyl Stearate; Methylcelluloses; |
| | Methylchloroisothiazolinone; Methylisothiazolinone; Methylparaben; |
| | Microcrystalline Wax; Mineral Oil; Mono And Diglyceride; |
| | Monostearyl Citrate; Multisterol Extract; Myristyl Alcohol; Myristyl |
| | Lactate; Niacinamide; Nitric Acid; Nitrogen; Nonoxynol Iodine; |
| | Nonoxynol-15; Nonoxynol-9; Oatmeal; Octadecene-1/Maleic Acid |
| | Copolymer; Octoxynol-1; Octoxynol-9; Octyldodecanol; Oleic Acid; |
| | Oleth-10/Oleth-5; Oleth-2; Oleth-20; Oleyl Alcohol; Oleyl Oleate; |
| | Olive Oil; Palmitamine Oxide; Parabens; Paraffin; Paraffin, White Soft; |
| | Parfum Creme 45/3; Peanut Oil; Peanut Oil, Refined; Pectin; Peg 6-32 |
| | Stearate/Glycol Stearate; Peg-100 Stearate; Peg-12 Glyceryl Laurate; |
| | Peg-120 Glyceryl Stearate; Peg-120 Methyl Glucose Dioleate; Peg-15 |
| | Cocamine; Peg-150 Distearate; Peg-2 Stearate; Peg-22 Methyl |
| | Ether/Dodecyl Glycol Copolymer; Peg-25 Propylene Glycol Stearate; |
| | Peg-4 Dilaurate; Peg-4 Laurate; Peg-45/Dodecyl Glycol Copolymer; |
| | Peg-5 Oleate; Peg-50 Stearate; Peg-54 Hydrogenated Castor Oil; Peg-6 |
| | Isostearate; Peg-60 Hydrogenated Castor Oil; Peg-7 Methyl Ether; Peg- |
| | 75 Lanolin; Peg-8 Laurate; Peg-8 Stearate; Pegoxol 7 Stearate; |
| | Pentaerythritol Cocoate; Peppermint Oil; Perfume 25677; Perfume |
| | Bouquet; Perfume E-1991; Perfume Gd 5604; Perfume Tana 90/42 |
| | Scba; Perfume W-1952-1; Petrolatum; Petrolatum, White; Petroleum |
| | Distillates; Phenonip; Phenoxyethanol; Phenylmercuric Acetate; |
| | Phosphoric Acid; Pine Needle Oil (Pinus Sylvestris); Plastibase-50w; |
| | Polidronium Chloride; Poloxamer 124; Poloxamer 181; Poloxamer 182; |
| | Poloxamer 188; Poloxamer 237; Poloxamer 407; Polycarbophil; |
| | Polyethylene Glycol 1000; Polyethylene Glycol 1450; Polyethylene |
| | Glycol 1500; Polyethylene Glycol 1540; Polyethylene Glycol 200; |
| | Polyethylene Glycol 300; Polyethylene Glycol 300-1600; Polyethylene |
| | Glycol 3350; Polyethylene Glycol 400; Polyethylene Glycol 4000; |
| | Polyethylene Glycol 540; Polyethylene Glycol 600; Polyethylene |
| | Glycol 6000; Polyethylene Glycol 8000; Polyethylene Glycol 900; |
| | Polyhydroxyethyl Methacrylate; Polyisobutylene; Polyisobutylene |
| | (1100000 Mw); Polyoxyethylene-Polyoxypropylene 1800; |
| | Polyoxyethylene Alcohols; Polyoxyethylene Fatty Acid Esters; |
| | Polyoxyethylene Propylene; Polyoxyl 20 Cetostearyl Ether; Polyoxyl 40 |
| | Hydrogenated Castor Oil; Polyoxyl 40 Stearate; Polyoxyl 400 Stearate; |
| | Polyoxyl 6 And Polyoxyl 32 Palmitostearate; Polyoxyl Distearate; |
| | Polyoxyl Glyceryl Stearate; Polyoxyl Lanolin; Polyoxyl Stearate; |
| | Polypropylene; Polyquaternium-10; Polysorbate 20; Polysorbate 40; |
| | Polysorbate 60; Polysorbate 65; Polysorbate 80; Polyvinyl Alcohol; |
| | Potash; Potassium Citrate; Potassium Hydroxide; Potassium Soap; |
| | Potassium Sorbate; Povidone Acrylate Copolymer; Povidone Hydrogel; |
| | Povidone K90; Povidone/Eicosene Copolymer; Povidones; Ppg- |
| | 12/Smdi Copolymer; Ppg-15 Stearyl Ether; Ppg-20 Methyl Glucose |
| | Ether Distearate; Ppg-26 Oleate; Product Wat; Promulgen D; |
| | Promulgen G; Propane; Propellant A-46; Propyl Gallate; Propylene |
| | Carbonate; Propylene Glycol; Propylene Glycol Diacetate; Propylene |
| | Glycol Dicaprylate; Propylene Glycol Monopalmitostearate; Propylene |
| | Glycol Palmitostearate; Propylene Glycol Ricinoleate; Propylene |
| | Glycol/Diazolidinyl Urea/Methylparaben/Propylparben; Propylparaben; |
| | Protein Hydrolysate; Quaternium-15; Quaternium-15 Cis-Form; |
| | Quaternium-52; Saccharin; Saccharin Sodium; Safflower Oil; Sd |
| | Alcohol 3a; Sd Alcohol 40; Sd Alcohol 40-2; Sd Alcohol 40b; Sepineo |
| | P 600; Shea Butter; Silicon; Silicon Dioxide; Silicone; Silicone |
| | Adhesive Bio-Psa Q7-4201; Silicone Adhesive Bio-Psa Q7-4301; |
| | Silicone Emulsion; Simethicone; Simethicone Emulsion; Sipon Ls |
| | 20np; Sodium Acetate; Sodium Acetate Anhydrous; Sodium Alkyl |
| | Sulfate; Sodium Benzoate; Sodium Bisulfite; Sodium Borate; Sodium |
| | Cetostearyl Sulfate; Sodium Chloride; Sodium Citrate; Sodium Cocoyl |
| | Sarcosinate; Sodium Dodecylbenzenesulfonate; Sodium Formaldehyde |
| | Sulfoxylate; Sodium Hydroxide; Sodium Iodide; Sodium Lactate; |
| | Sodium Laureth-2 Sulfate; Sodium Laureth-3 Sulfate; Sodium Laureth- |
| | 5 Sulfate; Sodium Lauroyl Sarcosinate; Sodium Lauryl Sulfate; Sodium |
| | Lauryl Sulfoacetate; Sodium Metabisulfite; Sodium Phosphate; Sodium |
| | Phosphate, Dibasic; Sodium Phosphate, Dibasic, Anhydrous; Sodium |
| | Phosphate, Dibasic, Dihydrate; Sodium Phosphate, Dibasic, |
| | Heptahydrate; Sodium Phosphate, Monobasic; Sodium Phosphate, |
| | Monobasic, Anhydrous; Sodium Phosphate, Monobasic, Dihydrate; |
| | Sodium Phosphate, Monobasic, Monohydrate; Sodium Polyacrylate |
| | (2500000 Mw); Sodium Pyrrolidone Cathoxylate; Sodium Sulfite; |
| | Sodium Sulfosuccinated Undecyclenic Monoalkylolamide; Sodium |
| | Thiosulfate; Sodium Xylenesulfonate; Somay 44; Sorbic Acid; |
| | Sorbitan; Sorbitan Isostearate; Sorbitan Monolaurate; Sorbitan |
| | Monooleate; Sorbitan Monopalmitate; Sorbitan Monostearate; Sorbitan |
| | Sesquioleate; Sorbitan Tristearate; Sorbitol; Sorbitol Solution; Soybean |
| | Flour; Soybean Oil; Spearmint Oil; Spermaceti; Squalane; Starch; |
| | Stearalkonium Chloride; Stearamidoethyl Diethylamine; Steareth-10; |
| | Steareth-100; Steareth-2; Steareth-20; Steareth-21; Steareth-40; Stearic |
| | Acid; Stearic Diethanolamide; Stearoxytrimethylsilane; Steartrimonium |
| | Hydrolyzed Animal Collagen; Stearyl Alcohol; |
| | Styrene/Isoprene/Styrene Block Copolymer; Sucrose; Sucrose |
| | Distearate; Sucrose Polyesters; Sulfacetamide Sodium; Sulfuric Acid; |
| | Surfactol Qs; Talc; Tall Oil; Tallow Glycerides; Tartaric Acid; Tenox; |
| | Tenox-2; Tert-Butyl Alcohol; Tert-Butyl Hydroperoxide; Thimerosal; |
| | Titanium Dioxide; Tocopherol; Tocophersolan; |
| | Trichloromonofluoromethane; Trideceth-10; Triethanolamine Lauryl |
| | Sulfate; Triglycerides, Medium Chain; Trihydroxystearin; Trilaneth-4 |
| | Phosphate; Trilaureth-4 Phosphate; Trisodium Citrate Dihydrate; |
| | Trisodium Hedta; Triton X-200; Trolamine; Tromethamine; Tyloxapol; |
| | Undecylenic Acid; Vegetable Oil; Vegetable Oil, Hydrogenated; |
| | Viscarin; Vitamin E; Wax, Emulsifying; Wecobee Fs; White Wax; |
| | Xanthan Gum; Zinc Acetate |
| Transdermal | Acrylates Copolymer; Acrylic Acid-Isooctyl Acrylate Copolymer; |
| | Acrylic Adhesive 788; Adcote 72a103; Aerotex Resin 3730; Alcohol; |
| | Alcohol, Dehydrated; Aluminum Polyester; Bentonite; Butylated |
| | Hydroxytoluene; Butylene Glycol; Butyric Acid; Caprylic/Capric |
| | Triglyceride; Carbomer 1342; Carbomer 940; Carbomer 980; |
| | Carrageenan; Cetylpyridinium Chloride; Citric Acid; Crospovidone; |
| | Daubert 1-5 Pestr (Matte) 164z; Diethylene Glycol Monoethyl Ether; |
| | Diethylhexyl Phthalate **See Cder Guidance: Limiting The Use Of |
| | Certain Phthalates As Excipients In Cder-Regulated Products; |
| | Dimethicone Copolyol; Dimethicone Mdx4-4210; Dimethicone Medical |
| | Fluid 360; Dimethylaminoethyl Methacrylate-Butyl Methacrylate- |
| | Methyl Methacrylate Copolymer; Dipropylene Glycol; Duro-Tak 280- |
| | 2516; Duro-Tak 387-2516; Duro-Tak 80-1196; Duro-Tak 87-2070; |
| | Duro-Tak 87-2194; Duro-Tak 87-2287; Duro-Tak 87-2296; Duro-Tak |
| | 87-2888; Duro-Tak 87-2979; Edetate Disodium; Ethyl Acetate; Ethyl |
| | Oleate; Ethylcelluloses; Ethylene Vinyl Acetate Copolymer; Ethylene- |
| | Propylene Copolymer; Fatty Acid Esters; Gelva 737; Glycerin; Glyceryl |
| | Laurate; Glyceryl Oleate; Heptane; High Density Polyethylene; |
| | Hydrochloric Acid; Hydrogenated Polybutene 635-690; Hydroxyethyl |
| | Cellulose; Hydroxypropyl Cellulose; Isopropyl Myristate; Isopropyl |
| | Palmitate; Lactose; Lanolin Anhydrous; Lauryl Lactate; Lecithin; |
| | Levulinic Acid; Light Mineral Oil; Medical Adhesive Modified S-15; |
| | Methyl Alcohol; Methyl Laurate; Mineral Oil; Nitrogen; Octisalate; |
| | Octyldodecanol; Oleic Acid; Oleyl Alcohol; Oleyl Oleate; |
| | Pentadecalactone; Petrolatum, White; Polacrilin; Polyacrylic Acid |
| | (250000 Mw); Polybutene (1400 Mw); Polyester; Polyester Polyamine |
| | Copolymer; Polyester Rayon; Polyethylene Terephthalates; |
| | Polyisobutylene; Polyisobutylene (1100000 Mw); Polyisobutylene |
| | (35000 Mw); Polyisobutylene 178-236; Polyisobutylene 241-294; |
| | Polyisobutylene 35-39; Polyisobutylene Low Molecular Weight; |
| | Polyisobutylene Medium Molecular Weight; |
| | Polyisobutylene/Polybutene Adhesive; Polypropylene; Polyvinyl |
| | Acetate; Polyvinyl Alcohol; Polyvinyl Chloride; Polyvinyl Chloride- |
| | Polyvinyl Acetate Copolymer; Polyvinylpyridine; Povidone K29/32; |
| | Povidones; Propylene Glycol; Propylene Glycol Monolaurate; Ra-2397; |
| | Ra-3011; Silicon; Silicon Dioxide, Colloidal; Silicone; Silicone |
| | Adhesive 4102; Silicone Adhesive 4502; Silicone Adhesive Bio-Psa |
| | Q7-4201; Silicone Adhesive Bio-Psa Q7-4301; Silicone/Polyester Film |
| | Strip; Sodium Chloride; Sodium Citrate; Sodium Hydroxide; Sorbitan |
| | Monooleate; Stearalkonium Hectorite/Propylene Carbonate; Titanium |
| | Dioxide; Triacetin; Trolamine; Tromethamine; Union 76 Amsco-Res |
| | 6038; Viscose/Cotton |
| Transmucosal | Magnesium Stearate; Mannitol; Potassium Bicarbonate; Sodium Starch |
| | Glycolate |
| Ureteral | Benzyl Alcohol; Diatrizoic Acid; Edetate Calcium Disodium; Edetate |
| | Disodium; Hydrochloric Acid; Meglumine; Methylparaben; |
| | Propylparaben; Sodium Citrate; Sodium Hydroxide |
| Urethral | Diatrizoic Acid; Edetate Calcium Disodium; Edetate Disodium; |
| | Hydrochloric Acid; Meglumine; Methylparaben; Polyethylene Glycol |
| | 1450; Propylparaben; Sodium Hydroxide; Sodium Phosphate, Dibasic, |
| | Heptahydrate; Tromethamine |
| Vaginal | Adipic Acid; Alcohol, Denatured; Allantoin; Anhydrous Lactose; |
| | Apricot Kernel Oil Peg-6 Esters; Barium Sulfate; Beeswax; Bentonite; |
| | Benzoic Acid; Benzyl Alcohol; Butylated Hydroxyanisole; Butylated |
| | Hydroxytoluene; Calcium Lactate; Carbomer 934; Carbomer 934p; |
| | Cellulose, Microcrystalline; Ceteth-20; Cetostearyl Alcohol; Cetyl |
| | Alcohol; Cetyl Esters Wax; Cetyl Palmitate; Cholesterol; Choleth; |
| | Citric Acid; Citric Acid Monohydrate; Coconut Oil/Palm Kernel Oil |
| | Glycerides, Hydrogenated; Crospovidone; Edetate Disodium; |
| | Ethylcelluloses; Ethylene-Vinyl Acetate Copolymer (28% Vinyl |
| | Acetate); Ethylene-Vinyl Acetate Copolymer (9% Vinylacetate); Fatty |
| | Alcohols; Fd&C Yellow No. 5; Gelatin; Glutamic Acid, Dl-; Glycerin; |
| | Glyceryl Isostearate; Glyceryl Monostearate; Glyceryl Stearate; Guar |
| | Gum; High Density Polyethylene; Hydrogel Polymer; Hydrogenated |
| | Palm Oil; Hypromellose 2208 (15000 Mpa.S); Hypromelloses; |
| | Isopropyl Myristate; Lactic Acid; Lactic Acid, Dl-; Lactose; Lactose |
| | Monohydrate; Lactose, Hydrous; Lanolin; Lanolin Anhydrous; |
| | Lecithin; Lecithin, Soybean; Light Mineral Oil; Magnesium Aluminum |
| | Silicate; Magnesium Aluminum Silicate Hydrate; Magnesium Stearate; |
| | Methyl Stearate; Methylparaben; Microcrystalline Wax; Mineral Oil; |
| | Nitric Acid; Octyldodecanol; Peanut Oil; Peg 6-32 Stearate/Glycol |
| | Stearate; Peg-100 Stearate; Peg-120 Glyceryl Stearate; Peg-2 Stearate; |
| | Peg-5 Oleate; Pegoxol 7 Stearate; Petrolatum, White; Phenylmercuric |
| | Acetate; Phospholipon 90g; Phosphoric Acid; Piperazine Hexahydrate; |
| | Poly(Dimethylsiloxane/Methylvinylsiloxane/Methylhydrogensiloxane) |
| | Dimethylvinyl Or Dimethylhydroxy Or Trimethyl Endblocked; |
| | Polycarbophil; Polyester; Polyethylene Glycol 1000; Polyethylene |
| | Glycol 3350; Polyethylene Glycol 400; Polyethylene Glycol 4000; |
| | Polyethylene Glycol 6000; Polyethylene Glycol 8000; Polyglyceryl-3 |
| | Oleate; Polyglyceryl-4 Oleate; Polyoxyl Palmitate; Polysorbate 20; |
| | Polysorbate 60; Polysorbate 80; Polyurethane; Potassium Alum; |
| | Potassium Hydroxide; Povidone K29/32; Povidones; Promulgen D; |
| | Propylene Glycol; Propylene Glycol Monopalmitostearate; |
| | Propylparaben; Quaternium-15 Cis-Form; Silicon Dioxide; Silicon |
| | Dioxide, Colloidal; Silicone; Sodium Bicarbonate; Sodium Citrate; |
| | Sodium Hydroxide; Sodium Lauryl Sulfate; Sodium Metabisulfite; |
| | Sodium Phosphate, Dibasic, Anhydrous; Sodium Phosphate, |
| | Monobasic, Anhydrous; Sorbic Acid; Sorbitan Monostearate; Sorbitol; |
| | Sorbitol Solution; Spermaceti; Stannous 2-Ethylhexanoate; Starch; |
| | Starch 1500, Pregelatinized; Starch, Corn; Stearamidoethyl |
| | Diethylamine; Stearic Acid; Stearyl Alcohol; Tartaric Acid, Dl-; Tert- |
| | Butylhydroquinone; Tetrapropyl Orthosilicate; Trolamine; Urea; |
| | Vegetable Oil, Hydrogenated; Wecobee Fs; White Ceresin Wax; White |
| | Wax |

[0638] Non-limiting routes of administration for the polynucleotides of the present invention are described below.

### Parenteral and Injectable Administration

[0639] Liquid dosage forms for parenteral administration include, but are not limited to, pharmaceutically acceptable emulsions, microemulsions, solutions, suspensions, syrups, and/or elixirs. In addition to active ingredients, liquid dosage forms may comprise inert diluents commonly used in the art such as, for example, water or other solvents, solubilizing agents and emulsifiers such as ethyl alcohol, isopropyl alcohol, ethyl carbonate, ethyl acetate, benzyl alcohol, benzyl benzoate, propylene glycol, 1,3-butylene glycol, dimethylformamide, oils (in particular, cottonseed, groundnut, corn, germ, olive, castor, and sesame oils), glycerol, tetrahydrofurfuryl alcohol, polyethylene glycols and fatty acid esters of sorbitan, and mixtures thereof. Besides inert diluents, oral compositions can include adjuvants such as wetting agents, emulsifying and suspending agents, sweetening, flavoring, and/or perfuming agents. In certain embodiments for parenteral administration, compositions are mixed with solubilizing agents such as CREMOPHOR alcohols, oils, modified oils, glycols, polysorbates, cyclodextrins, polymers, and/or combinations thereof.

[0640] A pharmaceutical composition for parenteral administration may comprise at least one inactive ingredient. Any or none of the inactive ingredients used may have been approved by the US Food and Drug Administration (FDA). A non-exhaustive list of inactive ingredients for use in pharmaceutical compositions for parenteral administration includes hydrochloric acid, mannitol, nitrogen, sodium acetate, sodium chloride and sodium hydroxide.

[0641] Injectable preparations, for example, sterile injectable aqueous or oleaginous suspensions may be formulated according to the known art using suitable dispersing agents, wetting agents, and/or suspending agents. Sterile injectable preparations may be sterile injectable solutions, suspensions, and/or emulsions in nontoxic parenterally acceptable diluents and/or solvents, for example, as a solution in 1,3-butanediol. Among the acceptable vehicles and solvents that may be employed are water, Ringer's solution, U.S.P., and isotonic sodium chloride solution. Sterile, fixed oils are conventionally employed as a solvent or suspending medium. For this purpose any bland fixed oil can be employed including synthetic mono- or diglycerides. Fatty acids such as oleic acid can be used in the preparation of injectables. The sterile formulation may also comprise adjuvants such as local anesthetics, preservatives and buffering agents.

[0642] Injectable formulations can be sterilized, for example, by filtration through a bacterial-retaining filter, and/or by incorporating sterilizing agents in the form of sterile solid compositions which can be dissolved or dispersed in sterile water or other sterile injectable medium prior to use.

[0643] Injectable formulations may be for direct injection into a region of a tissue, organ and/or subject. As a non-limiting example, a tissue, organ and/or subject may be directly injected a formulation by intramyocardial injection into the ischemic region. (See e.g., Zangi et al. Nature Biotechnology 2013; the contents of which are herein incorporated by reference in its entirety).

[0644] In order to prolong the effect of an active ingredient, it is often desirable to slow the absorption of the active ingredient from subcutaneous or intramuscular injection. This may be accomplished by the use of a liquid suspension of crystalline or amorphous material with poor water solubility. The rate of absorption of the drug then depends upon its rate of dissolution which, in turn, may depend upon crystal size and crystalline form. Alternatively, delayed absorption of a parenterally administered drug form is accomplished by dissolving or suspending the drug in an oil vehicle. Injectable depot forms are made by forming microencapsule matrices of the drug in biodegradable polymers such as polylactide-polyglycolide. Depending upon the ratio of drug to polymer and the nature of the particular polymer employed, the rate of drug release can be controlled. Examples of other biodegradable polymers include poly(orthoesters) and poly(anhydrides). Depot injectable formulations are prepared by entrapping the drug in liposomes or microemulsions which are compatible with body tissues.

### Rectal and Vaginal Administration

[0645] In one embodiment, the polynucleotides described here may be formulated for rectal and vaginal administration by the methods or compositions described in International Patent Application No. PCT/US2014/027077, the contents of which are incorporated by reference in its entirety, such as in paragraphs [000910]-[000913].

### Oral Administration

[0646] In one embodiment, the polynucleotides described here may be formulated for oral administration by the methods or compositions described in International Patent Application No. PCT/US2014/027077, the contents of which are incorporated by reference in its entirety, such as in paragraphs [000914]-[000924].

### Topical or Transdermal Administration

[0647] In one embodiment, the polynucleotides described here may be formulated for topical or transdermal administration by the methods or compositions described in International Patent Application No. PCT/US2014/027077, the contents of which are incorporated by reference in its entirety, such as in paragraphs [000925]-[000941].

### Depot Administration

[0648] In one embodiment, the polynucleotides described here may be formulated for depot administration by the methods or compositions described in International Patent Application No. PCT/US2014/027077, the contents of which are incorporated by reference in its entirety, such as in paragraphs [000942]-[000948].

### Pulmonary Administration

[0649] In one embodiment, the polynucleotides described here may be formulated for pulmonary administration by the methods or compositions described in International Patent Application No. PCT/US2014/027077, the contents of which are incorporated by reference in its entirety, such as in paragraphs [000949]-[000954].

### Intranasal, Nasal and Buccal Administration

[0650] In one embodiment, the polynucleotides described here may be formulated for intranasal, nasal or buccal administration by the methods or compositions described in International Patent Application No. PCT/US2014/027077, the contents of which are incorporated by reference in its entirety, such as in paragraphs [000955]-[000958].

### Ophthalmic and Auricular (Otic) Administration

[0651] In one embodiment, the polynucleotides described here may be formulated for ophthalmic or auricular (otic) administration by the methods or compositions described in International Patent Application No. PCT/US2014/027077, the contents of which are incorporated by reference in its entirety, such as in paragraphs [000959]-[000965].

### Payload Administration: Detectable Agents and Therapeutic Agents

[0652] The polynucleotides described herein can be used in a number of different scenarios in which delivery of a substance (the “payload”) to a biological target is desired, for example delivery of detectable substances for detection of the target, or delivery of a therapeutic agent. Detection methods can include, but are not limited to, both imaging in vitro and in vivo imaging methods, e.g., immunohistochemistry, bioluminescence imaging (BLI), Magnetic Resonance Imaging (MM), positron emission tomography (PET), electron microscopy, X-ray computed tomography, Raman imaging, optical coherence tomography, absorption imaging, thermal imaging, fluorescence reflectance imaging, fluorescence microscopy, fluorescence molecular tomographic imaging, nuclear magnetic resonance imaging, X-ray imaging, ultrasound imaging, photoacoustic imaging, lab assays, or in any situation where tagging/staining/imaging is required.

[0653] The polynucleotides can be designed to include both a linker and a payload in any useful orientation. For example, a linker having two ends is used to attach one end to the payload and the other end to the nucleobase, such as at the C-7 or C-8 positions of the deaza-adenosine or deaza-guanosine or to the N-3 or C-5 positions of cytosine or uracil. The polynucleotide of the invention can include more than one payload (e.g., a label and a transcription inhibitor), as well as a cleavable linker. In one embodiment, the modified nucleotide is a modified 7-deaza-adenosine triphosphate, where one end of a cleavable linker is attached to the C7 position of 7-deaza-adenine, the other end of the linker is attached to an inhibitor (e.g., to the C5 position of the nucleobase on a cytidine), and a label (e.g., Cy5) is attached to the center of the linker (see, e.g., compound 1 of A*pCp C5 Parg Capless in FIG. 5 and columns 9 and 10 of U.S. Pat. No. 7,994,304, incorporated herein by reference). Upon incorporation of the modified 7-deaza-adenosine triphosphate to an encoding region, the resulting polynucleotide having a cleavable linker attached to a label and an inhibitor (e.g., a polymerase inhibitor). Upon cleavage of the linker (e.g., with reductive conditions to reduce a linker having a cleavable disulfide moiety), the label and inhibitor are released. Additional linkers and payloads (e.g., therapeutic agents, detectable labels, and cell penetrating payloads) are described herein and in International Application PCT/US2013/30062 filed Mar. 9, 2013 (Attorney Docket Number M300), the contents of which are incorporated herein by reference in their entirety.

[0654] For example, the polynucleotides described herein can be used in reprogramming induced pluripotent stem cells (iPS cells), which can directly track cells that are transfected compared to total cells in the cluster. In another example, a drug that may be attached to the polynucleotides via a linker and may be fluorescently labeled can be used to track the drug in vivo, e.g. intracellularly. Other examples include, but are not limited to, the use of polynucleotides in reversible drug delivery into cells.

[0655] The polynucleotides described herein can be used in intracellular targeting of a payload, e.g., detectable or therapeutic agent, to specific organelle. Exemplary intracellular targets can include, but are not limited to, the nuclear localization for advanced mRNA processing, or a nuclear localization sequence (NLS) linked to the mRNA containing an inhibitor.

[0656] In addition, the polynucleotides described herein can be used to deliver therapeutic agents to cells or tissues, e.g., in living animals. For example, the polynucleotides described herein can be used to deliver highly polar chemotherapeutics agents to kill cancer cells. The polynucleotides attached to the therapeutic agent through a linker can facilitate member permeation allowing the therapeutic agent to travel into a cell to reach an intracellular target.

[0657] In one example, the linker is attached at the 2′-position of the ribose ring and/or at the 3′ and/or 5′ position of the polynucleotides (See e.g., International Pub. No. WO2012030683, herein incorporated by reference in its entirety). The linker may be any linker disclosed herein, known in the art and/or disclosed in International Pub. No. WO2012030683, herein incorporated by reference in its entirety.

[0658] In another example, the polynucleotides can be attached to the polynucleotides a viral inhibitory peptide (VIP) through a cleavable linker. The cleavable linker can release the VIP and dye into the cell. In another example, the polynucleotides can be attached through the linker to an ADP-ribosylate, which is responsible for the actions of some bacterial toxins, such as cholera toxin, diphtheria toxin, and pertussis toxin. These toxin proteins are ADP-ribosyltransferases that modify target proteins in human cells. For example, cholera toxin ADP-ribosylates G proteins modifies human cells by causing massive fluid secretion from the lining of the small intestine, which results in life-threatening diarrhea.

[0659] In some embodiments, the payload may be a therapeutic agent such as a cytotoxin, radioactive ion, chemotherapeutic, or other therapeutic agent. A cytotoxin or cytotoxic agent includes any agent that may be detrimental to cells. Examples include, but are not limited to, taxol, cytochalasin B, gramicidin D, ethidium bromide, emetine, mitomycin, etoposide, teniposide, vincristine, vinblastine, colchicine, doxorubicin, daunorubicin, dihydroxyanthracinedione, mitoxantrone, mithramycin, actinomycin D, 1-dehydrotestosterone, glucocorticoids, procaine, tetracaine, lidocaine, propranolol, puromycin, maytansinoids, e.g., maytansinol (see U.S. Pat. No. 5,208,020 incorporated herein in its entirety), rachelmycin (CC-1065, see U.S. Pat. Nos. 5,475,092, 5,585,499, and 5,846,545, all of which are incorporated herein by reference), and analogs or homologs thereof. Radioactive ions include, but are not limited to iodine (e.g., iodine 125 or iodine 131), strontium 89, phosphorous, palladium, cesium, iridium, phosphate, cobalt, yttrium 90, samarium 153, and praseodymium. Other therapeutic agents include, but are not limited to, antimetabolites (e.g., methotrexate, 6-mercaptopurine, 6-thioguanine, cytarabine, 5-fluorouracil decarbazine), alkylating agents (e.g., mechlorethamine, thiotepa chlorambucil, rachelmycin (CC-1065), melphalan, carmustine (BSNU), lomustine (CCNU), cyclophosphamide, busulfan, dibromomannitol, streptozotocin, mitomycin C, and cis-dichlorodiamine platinum (II) (DDP) cisplatin), anthracyclines (e.g., daunorubicin (formerly daunomycin) and doxorubicin), antibiotics (e.g., dactinomycin (formerly actinomycin), bleomycin, mithramycin, and anthramycin (AMC)), and anti-mitotic agents (e.g., vincristine, vinblastine, taxol and maytansinoids).

[0660] In some embodiments, the payload may be a detectable agent, such as various organic small molecules, inorganic compounds, nanoparticles, enzymes or enzyme substrates, fluorescent materials, luminescent materials (e.g., luminol), bioluminescent materials (e.g., luciferase, luciferin, and aequorin), chemiluminescent materials, radioactive materials (e.g., ¹⁸F, ⁶⁷Ga, ^{81m}Kr, ⁸²Rb, ¹¹¹In, ¹²³I, ¹³³Xe, ²⁰¹Tl, ¹²⁵I, ³⁵S, ¹⁴C, ³H, or ^{99m}Tc (e.g., as pertechnetate (technetate(VII), TcO₄—)), and contrast agents (e.g., gold (e.g., gold nanoparticles), gadolinium (e.g., chelated Gd), iron oxides (e.g., superparamagnetic iron oxide (SPIO), monocrystalline iron oxide nanoparticles (MIONs), and ultrasmall superparamagnetic iron oxide (USPIO)), manganese chelates (e.g., Mn-DPDP), barium sulfate, iodinated contrast media (iohexol), microbubbles, or perfluorocarbons). Such optically-detectable labels include for example, without limitation, 4-acetamido-4′-isothiocyanatostilbene-2,2′disulfonic acid; acridine and derivatives (e.g., acridine and acridine isothiocyanate); 5-(2′-aminoethyl)aminonaphthalene-1-sulfonic acid (EDANS); 4-amino-N-[3-vinylsulfonyl)phenyl]naphthalimide-3,5 disulfonate; N-(4-anilino-1-naphthyl)maleimide; anthranilamide; BODIPY; Brilliant Yellow; coumarin and derivatives (e.g., coumarin, 7-amino-4-methylcoumarin (AMC, Coumarin 120), and 7-amino-4-trifluoromethylcoumarin (Coumarin 151)); cyanine dyes; cyanosine; 4′,6-diaminidino-2-phenylindole (DAPI); 5′ 5″-dibromopyrogallol-sulfonaphthalein (Bromopyrogallol Red); 7-diethylamino-3-(4′-isothiocyanatophenyl)-4-methylcoumarin; diethylenetriamine pentaacetate; 4,4′-diisothiocyanatodihydro-stilbene-2,2′-disulfonic acid; 4,4′-diisothiocyanatostilbene-2,2′-disulfonic acid; 5-[dimethylamino]-naphthalene-1-sulfonyl chloride (DNS, dansylchloride); 4-dimethylaminophenylazophenyl-4′-isothiocyanate (DABITC); eosin and derivatives (e.g., eosin and eosin isothiocyanate); erythrosin and derivatives (e.g., erythrosin B and erythrosin isothiocyanate); ethidium; fluorescein and derivatives (e.g., 5-carboxyfluorescein (FAM), 5-(4,6-dichlorotriazin-2-yl)aminofluorescein (DTAF), 2′,7′-dimethoxy-4′5′-dichloro-6-carboxyfluorescein, fluorescein, fluorescein isothiocyanate, X-rhodamine-5-(and-6)-isothiocyanate (QFITC or XRITC), and fluorescamine); 2-[2-[3-[[1,3-dihydro-1,1-dimethyl-3-(3-sulfopropyl)-2H-benz[e]indol-2-ylidene]ethylidene]-2-[4-(ethoxycarbonyl)-1-piperazinyl]-1-cyclopenten-1-yl]ethenyl]-1,1-dimethyl-3-(3-sulforpropyl)-1H-benz[e]indolium hydroxide, inner salt, compound with n,n-diethylethanamine(1:1) (IR144); 5-chloro-2-[2-[3-[(5-chloro-3-ethyl-2(3H)-benzothiazol-ylidene)ethylidene]-2-(diphenylamino)-1-cyclopenten-1-yl]ethenyl]-3-ethyl benzothiazolium perchlorate (IR140); Malachite Green isothiocyanate; 4-methylumbelliferone orthocresolphthalein; nitrotyrosine; pararosaniline; Phenol Red; B-phycoerythrin; o-phthaldialdehyde; pyrene and derivatives (e.g., pyrene, pyrene butyrate, and succinimidyl 1-pyrene); butyrate quantum dots; Reactive Red 4 (CIBACRON™ Brilliant Red 3B-A); rhodamine and derivatives (e.g., 6-carboxy-X-rhodamine (ROX), 6-carboxyrhodamine (R6G), lissamine rhodamine B sulfonyl chloride rhodarnine (Rhod), rhodamine B, rhodamine 123, rhodamine X isothiocyanate, sulforhodamine B, sulforhodamine 101, sulfonyl chloride derivative of sulforhodamine 101 (Texas Red), N,N,N′,N letramethyl-6-carboxyrhodamine (TAMRA) tetramethyl rhodamine, and tetramethyl rhodamine isothiocyanate (TRITC)); riboflavin; rosolic acid; terbium chelate derivatives; Cyanine-3 (Cy3); Cyanine-5 (Cy5); cyanine-5.5 (Cy5.5), Cyanine-7 (Cy7); IRD 700; IRD 800; Alexa 647; La Jolta Blue; phthalo cyanine; and naphthalo cyanine.

[0661] In some embodiments, the detectable agent may be a non-detectable pre-cursor that becomes detectable upon activation (e.g., fluorogenic tetrazine-fluorophore constructs (e.g., tetrazine-BODIPY FL, tetrazine-Oregon Green 488, or tetrazine-BODIPY TMR-X) or enzyme activatable fluorogenic agents (e.g., PROSENSE® (VisEn Medical))). In vitro assays in which the enzyme labeled compositions can be used include, but are not limited to, enzyme linked immunosorbent assays (ELISAs), immunoprecipitation assays, immunofluorescence, enzyme immunoassays (EIA), radioimmunoassays (RIA), and Western blot analysis.

### Combinations

[0662] The polynucleotides may be used in combination with one or more other therapeutic, prophylactic, diagnostic, or imaging agents. By “in combination with,” it is not intended to imply that the agents must be administered at the same time and/or formulated for delivery together, although these methods of delivery are within the scope of the present disclosure. Compositions can be administered concurrently with, prior to, or subsequent to, one or more other desired therapeutics or medical procedures. In general, each agent will be administered at a dose and/or on a time schedule determined for that agent. In some embodiments, the present disclosure encompasses the delivery of pharmaceutical, prophylactic, diagnostic, or imaging compositions in combination with agents that may improve their bioavailability, reduce and/or modify their metabolism, inhibit their excretion, and/or modify their distribution within the body. In one embodiment, the polynucleotides described here may be used in combination with one or more other agents as described in International Patent Application No. PCT/US2014/027077, the contents of which are incorporated by reference in its entirety, such as in paragraphs [000978]-[001023].

[0663] It will further be appreciated that therapeutically, prophylactically, diagnostically, or imaging active agents utilized in combination may be administered together in a single composition or administered separately in different compositions. In general, it is expected that agents utilized in combination with be utilized at levels that do not exceed the levels at which they are utilized individually. In some embodiments, the levels utilized in combination will be lower than those utilized individually. In one embodiment, the combinations, each or together may be administered according to the split dosing regimens described herein.

### Dosing

[0664] The present invention provides methods comprising administering polynucleotides and their encoded proteins or complexes in accordance with the invention to a subject in need thereof. Nucleic acids, proteins or complexes, or pharmaceutical, imaging, diagnostic, or prophylactic compositions thereof, may be administered to a subject using any amount and any route of administration effective for preventing, treating, diagnosing, or imaging a disease, disorder, and/or condition (e.g., a disease, disorder, and/or condition relating to working memory deficits). The exact amount required will vary from subject to subject, depending on the species, age, and general condition of the subject, the severity of the disease, the particular composition, its mode of administration, its mode of activity, and the like. Compositions in accordance with the invention are typically formulated in dosage unit form for ease of administration and uniformity of dosage. It will be understood, however, that the total daily usage of the compositions of the present invention may be decided by the attending physician within the scope of sound medical judgment. The specific therapeutically effective, prophylactically effective, or appropriate imaging dose level for any particular patient will depend upon a variety of factors including the disorder being treated and the severity of the disorder; the activity of the specific compound employed; the specific composition employed; the age, body weight, general health, sex and diet of the patient; the time of administration, route of administration, and rate of excretion of the specific compound employed; the duration of the treatment; drugs used in combination or coincidental with the specific compound employed; and like factors well known in the medical arts.

[0665] In certain embodiments, compositions in accordance with the present invention may be administered at dosage levels sufficient to deliver from about 0.0001 mg/kg to about 100 mg/kg, from about 0.001 mg/kg to about 0.05 mg/kg, from about 0.005 mg/kg to about 0.05 mg/kg, from about 0.001 mg/kg to about 0.005 mg/kg, from about 0.05 mg/kg to about 0.5 mg/kg, from about 0.01 mg/kg to about 50 mg/kg, from about 0.1 mg/kg to about 40 mg/kg, from about 0.5 mg/kg to about 30 mg/kg, from about 0.01 mg/kg to about 10 mg/kg, from about 0.1 mg/kg to about 10 mg/kg, or from about 1 mg/kg to about 25 mg/kg, of subject body weight per day, one or more times a day, to obtain the desired therapeutic, diagnostic, prophylactic, or imaging effect (see e.g., the range of unit doses described in International Publication No WO2013078199, herein incorporated by reference in its entirety). The desired dosage may be delivered three times a day, two times a day, once a day, every other day, every third day, every week, every two weeks, every three weeks, or every four weeks. In certain embodiments, the desired dosage may be delivered using multiple administrations (e.g., two, three, four, five, six, seven, eight, nine, ten, eleven, twelve, thirteen, fourteen, or more administrations). When multiple administrations are employed, split dosing regimens such as those described herein may be used.

[0666] According to the present invention, it has been discovered that administration of polynucleotides in split-dose regimens produce higher levels of proteins in mammalian subjects. As used herein, a “split dose” is the division of single unit dose or total daily dose into two or more doses, e.g, two or more administrations of the single unit dose. As used herein, a “single unit dose” is a dose of any therapeutic administered in one dose/at one time/single route/single point of contact, i.e., single administration event. As used herein, a “total daily dose” is an amount given or prescribed in 24 hr period. It may be administered as a single unit dose. In one embodiment, the polynucleotides of the present invention are administered to a subject in split doses. The polynucleotides may be formulated in buffer only or in a formulation described herein.

### Dosage Forms

[0667] A pharmaceutical composition described herein can be formulated into a dosage form described herein, such as a topical, intranasal, intratracheal, or injectable (e.g., intravenous, intraocular, intravitreal, intramuscular, intracardiac, intraperitoneal, subcutaneous).

### Liquid Dosage Forms

[0668] Liquid dosage forms for parenteral administration include, but are not limited to, pharmaceutically acceptable emulsions, microemulsions, solutions, suspensions, syrups, and/or elixirs. In addition to active ingredients, liquid dosage forms may comprise inert diluents commonly used in the art including, but not limited to, water or other solvents, solubilizing agents and emulsifiers such as ethyl alcohol, isopropyl alcohol, ethyl carbonate, ethyl acetate, benzyl alcohol, benzyl benzoate, propylene glycol, 1,3-butylene glycol, dimethylformamide, oils (in particular, cottonseed, groundnut, corn, germ, olive, castor, and sesame oils), glycerol, tetrahydrofurfuryl alcohol, polyethylene glycols and fatty acid esters of sorbitan, and mixtures thereof. In certain embodiments for parenteral administration, compositions may be mixed with solubilizing agents such as CREMOPHOR®, alcohols, oils, modified oils, glycols, polysorbates, cyclodextrins, polymers, and/or combinations thereof.

### Injectable

[0669] Injectable preparations, for example, sterile injectable aqueous or oleaginous suspensions may be formulated according to the known art and may include suitable dispersing agents, wetting agents, and/or suspending agents. Sterile injectable preparations may be sterile injectable solutions, suspensions, and/or emulsions in nontoxic parenterally acceptable diluents and/or solvents, for example, a solution in 1,3-butanediol. Among the acceptable vehicles and solvents that may be employed include, but are not limited to, water, Ringer's solution, U.S.P., and isotonic sodium chloride solution. Sterile, fixed oils are conventionally employed as a solvent or suspending medium. For this purpose any bland fixed oil can be employed including synthetic mono- or diglycerides. Fatty acids such as oleic acid can be used in the preparation of injectables.

Injectable formulations can be sterilized, for example, by filtration through a bacterial-retaining filter, and/or by incorporating sterilizing agents in the form of sterile solid compositions which can be dissolved or dispersed in sterile water or other sterile injectable medium prior to use.
In order to prolong the effect of an active ingredient, it may be desirable to slow the absorption of the active ingredient from subcutaneous or intramuscular injection. This may be accomplished by the use of a liquid suspension of crystalline or amorphous material with poor water solubility. The rate of absorption of the polynucleotides then depends upon its rate of dissolution which, in turn, may depend upon crystal size and crystalline form. Alternatively, delayed absorption of a parenterally administered polynucleotides may be accomplished by dissolving or suspending the polynucleotides in an oil vehicle. Injectable depot forms are made by forming microencapsule matrices of the polynucleotides in biodegradable polymers such as polylactide-polyglycolide. Depending upon the ratio of polynucleotides to polymer and the nature of the particular polymer employed, the rate of polynucleotides release can be controlled. Examples of other biodegradable polymers include, but are not limited to, poly(orthoesters) and poly(anhydrides). Depot injectable formulations may be prepared by entrapping the polynucleotides in liposomes or microemulsions which are compatible with body tissues.

### Pulmonary

[0670] Formulations described herein as being useful for pulmonary delivery may also be used for intranasal delivery of a pharmaceutical composition. Another formulation suitable for intranasal administration may be a coarse powder comprising the active ingredient and having an average particle from about 0.2 μm to 500 Such a formulation may be administered in the manner in which snuff is taken, i.e. by rapid inhalation through the nasal passage from a container of the powder held close to the nose.

[0671] Formulations suitable for nasal administration may, for example, comprise from about as little as 0.1% (w/w) and as much as 100% (w/w) of active ingredient, and may comprise one or more of the additional ingredients described herein. A pharmaceutical composition may be prepared, packaged, and/or sold in a formulation suitable for buccal administration. Such formulations may, for example, be in the form of tablets and/or lozenges made using conventional methods, and may, for example, contain about 0.1% to 20% (w/w) active ingredient, where the balance may comprise an orally dissolvable and/or degradable composition and, optionally, one or more of the additional ingredients described herein. Alternately, formulations suitable for buccal administration may comprise a powder and/or an aerosolized and/or atomized solution and/or suspension comprising active ingredient. Such powdered, aerosolized, and/or aerosolized formulations, when dispersed, may have an average particle and/or droplet size in the range from about 0.1 nm to about 200 nm, and may further comprise one or more of any additional ingredients described herein.

[0672] General considerations in the formulation and/or manufacture of pharmaceutical agents may be found, for example, in Remington: The Science and Practice of Pharmacy 21^{st} ed., Lippincott Williams & Wilkins, 2005 (incorporated herein by reference in its entirety).

### Coatings or Shells

[0673] Solid dosage forms of tablets, dragees, capsules, pills, and granules can be prepared with coatings and shells such as enteric coatings and other coatings well known in the pharmaceutical formulating art. They may optionally comprise opacifying agents and can be of a composition that they release the active ingredient(s) only, or preferentially, in a certain part of the intestinal tract, optionally, in a delayed manner. Examples of embedding compositions which can be used include polymeric substances and waxes. Solid compositions of a similar type may be employed as fillers in soft and hard-filled gelatin capsules using such excipients as lactose or milk sugar as well as high molecular weight polyethylene glycols and the like.

### Multi-Dose and Repeat-Dose Administration

[0674] In some embodiments, compounds and/or compositions of the present invention may be administered in two or more doses (referred to herein as “multi-dose administration”). Such doses may comprise the same components or may comprise components not included in a previous dose. Such doses may comprise the same mass and/or volume of components or an altered mass and/or volume of components in comparison to a previous dose. In some embodiments, multi-dose administration may comprise repeat-dose administration. As used herein, the term “repeat-dose administration” refers to two or more doses administered consecutively or within a regimen of repeat doses comprising substantially the same components provided at substantially the same mass and/or volume. In some embodiments, subjects may display a repeat-dose response. As used herein, the term “repeat-dose response” refers to a response in a subject to a repeat-dose that differs from that of another dose administered within a repeat-dose administration regimen. In some embodiments, such a response may be the expression of a protein in response to a repeat-dose comprising mRNA. In such embodiments, protein expression may be elevated in comparison to another dose administered within a repeat-dose administration regimen or protein expression may be reduced in comparison to another dose administered within a repeat-dose administration regimen. Alteration of protein expression may be from about 1% to about 20%, from about 5% to about 50% from about 10% to about 60%, from about 25% to about 75%, from about 40% to about 100% and/or at least 100%. A reduction in expression of mRNA administered as part of a repeat-dose regimen, wherein the level of protein translated from the administered RNA is reduced by more than 40% in comparison to another dose within the repeat-dose regimen is referred to herein as “repeat-dose resistance.”

### Properties of the Pharmaceutical Compositions

[0675] The pharmaceutical compositions described herein can be characterized by one or more of the following properties:

### Bioavailability

[0676] The polynucleotides, when formulated into a composition with a delivery agent as described herein, can exhibit an increase in bioavailability as compared to a composition lacking a delivery agent as described herein. As used herein, the term “bioavailability” refers to the systemic availability of a given amount of polynucleotides administered to a mammal. Bioavailability can be assessed by measuring the area under the curve (AUC) or the maximum serum or plasma concentration (Cmax) of the unchanged form of a compound following administration of the compound to a mammal. AUC is a determination of the area under the curve plotting the serum or plasma concentration of a compound along the ordinate (Y-axis) against time along the abscissa (X-axis). Generally, the AUC for a particular compound can be calculated using methods known to those of ordinary skill in the art and as described in G. S. Banker, Modern Pharmaceutics, Drugs and the Pharmaceutical Sciences, v. 72, Marcel Dekker, New York, Inc., 1996, herein incorporated by reference in its entirety.

[0677] The Cₘₐₓ value is the maximum concentration of the compound achieved in the serum or plasma of a mammal following administration of the compound to the mammal. The Cₘₐₓ value of a particular compound can be measured using methods known to those of ordinary skill in the art. The phrases “increasing bioavailability” or “improving the pharmacokinetics,” as used herein mean that the systemic availability of a first polynucleotides, measured as AUC, Cₘₐₓ, or Cₘᵢₙ in a mammal is greater, when co-administered with a delivery agent as described herein, than when such co-administration does not take place. In some embodiments, the bioavailability of the polynucleotides can increase by at least about 2%, at least about 5%, at least about 10%, at least about 15%, at least about 20%, at least about 25%, at least about 30%, at least about 35%, at least about 40%, at least about 45%, at least about 50%, at least about 55%, at least about 60%, at least about 65%, at least about 70%, at least about 75%, at least about 80%, at least about 85%, at least about 90%, at least about 95%, or about 100%.

[0678] In some embodiments, liquid formulations of polynucleotides may have varying in vivo half-life, requiring modulation of doses to yield a therapeutic effect. To address this, in some embodiments of the present invention, polynucleotides formulations may be designed to improve bioavailability and/or therapeutic effect during repeat administrations. Such formulations may enable sustained release of polynucleotides and/or reduce polynucleotide degradation rates by nucleases. In some embodiments, suspension formulations are provided comprising polynucleotides, water immiscible oil depots, surfactants and/or co-surfactants and/or co-solvents. Combinations of oils and surfactants may enable suspension formulation with polynucleotides. Delivery of polynucleotides in a water immiscible depot may be used to improve bioavailability through sustained release of polynucleotides from the depot to the surrounding physiologic environment and/or prevent polynucleotide degradation by nucleases.

[0679] In some embodiments, cationic nanoparticles comprising combinations of divalent and monovalent cations may be formulated with polynucleotides. Such nanoparticles may form spontaneously in solution over a given period (e.g. hours, days, etc). Such nanoparticles do not form in the presence of divalent cations alone or in the presence of monovalent cations alone. The delivery of polynucleotides in cationic nanoparticles or in one or more depot comprising cationic nanoparticles may improve polynucleotide bioavailability by acting as a long-acting depot and/or reducing the rate of degradation by nucleases.

### Therapeutic Window

[0680] The polynucleotides, when formulated into a composition with a delivery agent as described herein, can exhibit an increase in the therapeutic window of the administered polynucleotides composition as compared to the therapeutic window of the administered polynucleotides composition lacking a delivery agent as described herein. As used herein “therapeutic window” refers to the range of plasma concentrations, or the range of levels of therapeutically active substance at the site of action, with a high probability of eliciting a therapeutic effect. In some embodiments, the therapeutic window of the polynucleotides when co-administered with a delivery agent as described herein can increase by at least about 2%, at least about 5%, at least about 10%, at least about 15%, at least about 20%, at least about 25%, at least about 30%, at least about 35%, at least about 40%, at least about 45%, at least about 50%, at least about 55%, at least about 60%, at least about 65%, at least about 70%, at least about 75%, at least about 80%, at least about 85%, at least about 90%, at least about 95%, or about 100%.

### Volume of Distribution

[0681] The polynucleotides, when formulated into a composition with a delivery agent as described herein, can exhibit an improved volume of distribution (Vthst), e.g., reduced or targeted, relative to a composition lacking a delivery agent as described herein. The volume of distribution (Vdist) relates the amount of the drug in the body to the concentration of the drug in the blood or plasma. As used herein, the term “volume of distribution” refers to the fluid volume that would be required to contain the total amount of the drug in the body at the same concentration as in the blood or plasma: Vdist equals the amount of drug in the body/concentration of drug in blood or plasma. For example, for a 10 mg dose and a plasma concentration of 10 mg/L, the volume of distribution would be 1 liter. The volume of distribution reflects the extent to which the drug is present in the extravascular tissue. A large volume of distribution reflects the tendency of a compound to bind to the tissue components compared with plasma protein binding. In a clinical setting, Vdist can be used to determine a loading dose to achieve a steady state concentration. In some embodiments, the volume of distribution of the polynucleotides when co-administered with a delivery agent as described herein can decrease at least about 2%, at least about 5%, at least about 10%, at least about 15%, at least about 20%, at least about 25%, at least about 30%, at least about 35%, at least about 40%, at least about 45%, at least about 50%, at least about 55%, at least about 60%, at least about 65%, at least about 70%.

### Biological Effect

[0682] In one embodiment, the biological effect of the polynucleotides delivered to the animals may be categorized by analyzing the protein expression in the animals. The protein expression may be determined from analyzing a biological sample collected from a mammal administered the polynucleotides of the present invention. In one embodiment, the expression protein encoded by the polynucleotides administered to the mammal of at least 50 pg/ml may be preferred. For example, a protein expression of 50-200 pg/ml for the protein encoded by the polynucleotides delivered to the mammal may be seen as a therapeutically effective amount of protein in the mammal.

### Detection of Polynucleotides Acids by Mass Spectrometry

[0683] Mass spectrometry (MS) is an analytical technique that can provide structural and molecular mass/concentration information on molecules after their conversion to ions. The molecules are first ionized to acquire positive or negative charges and then they travel through the mass analyzer to arrive at different areas of the detector according to their mass/charge (m/z) ratio.

[0684] Mass spectrometry is performed using a mass spectrometer which includes an ion source for ionizing the fractionated sample and creating charged molecules for further analysis. For example ionization of the sample may be performed by electrospray ionization (ESI), atmospheric pressure chemical ionization (APCI), photoionization, electron ionization, fast atom bombardment (FAB)/liquid secondary ionization (LSIMS), matrix assisted laser desorption/ionization (MALDI), field ionization, field desorption, thermospray/plasmaspray ionization, and particle beam ionization. The skilled artisan will understand that the choice of ionization method can be determined based on the analyte to be measured, type of sample, the type of detector, the choice of positive versus negative mode, etc.

[0685] After the sample has been ionized, the positively charged or negatively charged ions thereby created may be analyzed to determine a mass-to-charge ratio (i.e., m/z). Suitable analyzers for determining mass-to-charge ratios include quadropole analyzers, ion traps analyzers, and time-of-flight analyzers. The ions may be detected using several detection modes. For example, selected ions may be detected (i.e., using a selective ion monitoring mode (SIM)), or alternatively, ions may be detected using a scanning mode, e.g., multiple reaction monitoring (MRM) or selected reaction monitoring (SRM).

[0686] Liquid chromatography-multiple reaction monitoring (LC-MS/MRM) coupled with stable isotope labeled dilution of peptide standards has been shown to be an effective method for protein verification (e.g., Keshishian et al., Mol Cell Proteomics 2009 8: 2339-2349; Kuhn et al., Clin Chem 2009 55:1108-1117; Lopez et al., Clin Chem 2010 56:281-290; each of which are herein incorporated by reference in its entirety). Unlike untargeted mass spectrometry frequently used in biomarker discovery studies, targeted MS methods are peptide sequence-based modes of MS that focus the full analytical capacity of the instrument on tens to hundreds of selected peptides in a complex mixture. By restricting detection and fragmentation to only those peptides derived from proteins of interest, sensitivity and reproducibility are improved dramatically compared to discovery-mode MS methods. This method of mass spectrometry-based multiple reaction monitoring (MRM) quantitation of proteins can dramatically impact the discovery and quantitation of biomarkers via rapid, targeted, multiplexed protein expression profiling of clinical samples.

[0687] In one embodiment, a biological sample which may contain at least one protein encoded by at least one polynucleotide of the present invention may be analyzed by the method of MRM-MS. The quantification of the biological sample may further include, but is not limited to, isotopically labeled peptides or proteins as internal standards.

[0688] According to the present invention, the biological sample, once obtained from the subject, may be subjected to enzyme digestion. As used herein, the term “digest” means to break apart into shorter peptides. As used herein, the phrase “treating a sample to digest proteins” means manipulating a sample in such a way as to break down proteins in a sample. These enzymes include, but are not limited to, trypsin, endoproteinase Glu-C and chymotrypsin. In one embodiment, a biological sample which may contain at least one protein encoded by at least one polynucleotide of the present invention may be digested using enzymes.

[0689] In one embodiment, a biological sample which may contain protein encoded by polynucleotides of the present invention may be analyzed for protein using electrospray ionization. Electrospray ionization (ESI) mass spectrometry (ESIMS) uses electrical energy to aid in the transfer of ions from the solution to the gaseous phase before they are analyzed by mass spectrometry. Samples may be analyzed using methods known in the art (e.g., Ho et al., Clin Biochem Rev. 2003 24(1):3-12; herein incorporated by reference in its entirety). The ionic species contained in solution may be transferred into the gas phase by dispersing a fine spray of charge droplets, evaporating the solvent and ejecting the ions from the charged droplets to generate a mist of highly charged droplets. The mist of highly charged droplets may be analyzed using at least 1, at least 2, at least 3 or at least 4 mass analyzers such as, but not limited to, a quadropole mass analyzer. Further, the mass spectrometry method may include a purification step. As a non-limiting example, the first quadrapole may be set to select a single m/z ratio so it may filter out other molecular ions having a different m/z ratio which may eliminate complicated and time-consuming sample purification procedures prior to MS analysis.

[0690] In one embodiment, a biological sample which may contain protein encoded by polynucleotides of the present invention may be analyzed for protein in a tandem ESIMS system (e.g., MS/MS). As non-limiting examples, the droplets may be analyzed using a product scan (or daughter scan) a precursor scan (parent scan) a neutral loss or a multiple reaction monitoring.

[0691] In one embodiment, a biological sample which may contain protein encoded by polynucleotides of the present invention may be analyzed using matrix-assisted laser desorption/ionization (MALDI) mass spectrometry (MALDIMS). MALDI provides for the nondestructive vaporization and ionization of both large and small molecules, such as proteins. In MALDI analysis, the analyte is first co-crystallized with a large molar excess of a matrix compound, which may also include, but is not limited to, an ultraviolet absorbing weak organic acid. Non-limiting examples of matrices used in MALDI are α-cyano-4-hydroxycinnamic acid, 3,5-dimethoxy-4-hydroxycinnamic acid and 2,5-dihydroxybenzoic acid. Laser radiation of the analyte-matrix mixture may result in the vaporization of the matrix and the analyte. The laser induced desorption provides high ion yields of the intact analyte and allows for measurement of compounds with high accuracy. Samples may be analyzed using methods known in the art (e.g., Lewis, Wei and Siuzdak, Encyclopedia of Analytical Chemistry 2000:5880-5894; herein incorporated by reference in its entirety). As non-limiting examples, mass analyzers used in the MALDI analysis may include a linear time-of-flight (TOF), a TOF reflectron or a Fourier transform mass analyzer.

[0692] In one embodiment, the analyte-matrix mixture may be formed using the dried-droplet method. A biologic sample is mixed with a matrix to create a saturated matrix solution where the matrix-to-sample ratio is approximately 5000:1. An aliquot (approximately 0.5-2.0 uL) of the saturated matrix solution is then allowed to dry to form the analyte-matrix mixture.

[0693] In one embodiment, the analyte-matrix mixture may be formed using the thin-layer method. A matrix homogeneous film is first formed and then the sample is then applied and may be absorbed by the matrix to form the analyte-matrix mixture.

[0694] In one embodiment, the analyte-matrix mixture may be formed using the thick-layer method. A matrix homogeneous film is formed with a nitro-cellulose matrix additive. Once the uniform nitro-cellulose matrix layer is obtained the sample is applied and absorbed into the matrix to form the analyte-matrix mixture.

[0695] In one embodiment, the analyte-matrix mixture may be formed using the sandwich method. A thin layer of matrix crystals is prepared as in the thin-layer method followed by the addition of droplets of aqueous trifluoroacetic acid, the sample and matrix. The sample is then absorbed into the matrix to form the analyte-matrix mixture.

### V. USES OF POLYNUCLEOTIDES OF THE INVENTION

[0696] The polynucleotides of the present invention are designed, in preferred embodiments, to provide for avoidance or evasion of deleterious bio-responses such as the immune response and/or degradation pathways, overcoming the threshold of expression and/or improving protein production capacity, improved expression rates or translation efficiency, improved drug or protein half life and/or protein concentrations, optimized protein localization, to improve one or more of the stability and/or clearance in tissues, receptor uptake and/or kinetics, cellular access by the compositions, engagement with translational machinery, secretion efficiency (when applicable), accessibility to circulation, and/or modulation of a cell's status, function and/or activity.

### Therapeutics

### Therapeutic Agents

[0697] The polynucleotides of the present invention, such as modified nucleic acids and modified RNAs, and the proteins translated from them described herein can be used as therapeutic or prophylactic agents. They are provided for use in medicine. For example, a polynucleotide described herein can be administered to a subject, wherein the polynucleotides are translated in vivo to produce a therapeutic or prophylactic polypeptide in the subject. Provided are compositions, methods, kits, and reagents for diagnosis, treatment or prevention of a disease or condition in humans and other mammals. The active therapeutic agents of the invention include polynucleotides, cells containing polynucleotides or polypeptides translated from the polynucleotides.

[0698] In certain embodiments, provided herein are combination therapeutics containing one or more polynucleotides containing translatable regions that encode for a protein or proteins that boost a mammalian subject's immunity along with a protein that induces antibody-dependent cellular toxicity. For example, provided herein are therapeutics containing one or more nucleic acids that encode trastuzumab and granulocyte-colony stimulating factor (G-CSF). In particular, such combination therapeutics are useful in Her2+ breast cancer patients who develop induced resistance to trastuzumab. (See, e.g., Albrecht, Immunotherapy. 2(6):795-8 (2010)).

[0699] Provided herein are methods of inducing translation of a recombinant polypeptide in a cell population using the polynucleotides described herein. Such translation can be in vivo, ex vivo, in culture, or in vitro. The cell population is contacted with an effective amount of a composition containing a nucleic acid that has at least one nucleoside modification, and a translatable region encoding the recombinant polypeptide. The population is contacted under conditions such that the nucleic acid is localized into one or more cells of the cell population and the recombinant polypeptide is translated in the cell from the nucleic acid.

[0700] An “effective amount” of the composition is provided based, at least in part, on the target tissue, target cell type, means of administration, physical characteristics of the nucleic acid (e.g., size, and extent of modified nucleosides), and other determinants. In general, an effective amount of the composition provides efficient protein production in the cell, preferably more efficient than a composition containing a corresponding unmodified nucleic acid. Increased efficiency may be demonstrated by increased cell transfection (i.e., the percentage of cells transfected with the nucleic acid), increased protein translation from the nucleic acid, decreased nucleic acid degradation (as demonstrated, e.g., by increased duration of protein translation from a modified nucleic acid), or reduced innate immune response of the host cell.

[0701] Aspects of the invention are directed to methods of inducing in vivo translation of a recombinant polypeptide in a mammalian subject in need thereof. Therein, an effective amount of a composition containing a nucleic acid that has at least one structural or chemical modification and a translatable region encoding the recombinant polypeptide is administered to the subject using the delivery methods described herein. The nucleic acid is provided in an amount and under other conditions such that the nucleic acid is localized into a cell of the subject and the recombinant polypeptide is translated in the cell from the nucleic acid. The cell in which the nucleic acid is localized, or the tissue in which the cell is present, may be targeted with one or more than one rounds of nucleic acid administration.

[0702] In certain embodiments, the administered polynucleotides directs production of one or more recombinant polypeptides that provide a functional activity which is substantially absent in the cell, tissue or organism in which the recombinant polypeptide is translated. For example, the missing functional activity may be enzymatic, structural, or gene regulatory in nature. In related embodiments, the administered polynucleotides directs production of one or more recombinant polypeptides that increases (e.g., synergistically) a functional activity which is present but substantially deficient in the cell in which the recombinant polypeptide is translated.

[0703] In other embodiments, the administered polynucleotides directs production of one or more recombinant polypeptides that replace a polypeptide (or multiple polypeptides) that is substantially absent in the cell in which the recombinant polypeptide is translated. Such absence may be due to genetic mutation of the encoding gene or regulatory pathway thereof. In some embodiments, the recombinant polypeptide increases the level of an endogenous protein in the cell to a desirable level; such an increase may bring the level of the endogenous protein from a subnormal level to a normal level or from a normal level to a super-normal level.

[0704] Alternatively, the recombinant polypeptide functions to antagonize the activity of an endogenous protein present in, on the surface of, or secreted from the cell. Usually, the activity of the endogenous protein is deleterious to the subject; for example, due to mutation of the endogenous protein resulting in altered activity or localization. Additionally, the recombinant polypeptide antagonizes, directly or indirectly, the activity of a biological moiety present in, on the surface of, or secreted from the cell. Examples of antagonized biological moieties include lipids (e.g., cholesterol), a lipoprotein (e.g., low density lipoprotein), a nucleic acid, a carbohydrate, a protein toxin such as shiga and tetanus toxins, or a small molecule toxin such as botulinum, cholera, and diphtheria toxins. Additionally, the antagonized biological molecule may be an endogenous protein that exhibits an undesirable activity, such as a cytotoxic or cytostatic activity.

[0705] The recombinant proteins described herein may be engineered for localization within the cell, potentially within a specific compartment such as the nucleus, or are engineered for secretion from the cell or translocation to the plasma membrane of the cell.

[0706] In some embodiments, polynucleotides and their encoded polypeptides in accordance with the present invention may be used for treatment of any of a variety of diseases, disorders, and/or conditions, including but not limited to one or more of the following: autoimmune disorders (e.g. diabetes, lupus, multiple sclerosis, psoriasis, rheumatoid arthritis); inflammatory disorders (e.g. arthritis, pelvic inflammatory disease); infectious diseases (e.g. viral infections (e.g., HIV, HCV, RSV), bacterial infections, fungal infections, sepsis); neurological disorders (e.g. Alzheimer's disease, Huntington's disease; autism; Duchenne muscular dystrophy); cardiovascular disorders (e.g. atherosclerosis, hypercholesterolemia, thrombosis, clotting disorders, angiogenic disorders such as macular degeneration); proliferative disorders (e.g. cancer, benign neoplasms); respiratory disorders (e.g. chronic obstructive pulmonary disease); digestive disorders (e.g. inflammatory bowel disease, ulcers); musculoskeletal disorders (e.g. fibromyalgia, arthritis); endocrine, metabolic, and nutritional disorders (e.g. diabetes, osteoporosis); urological disorders (e.g. renal disease); psychological disorders (e.g. depression, schizophrenia); skin disorders (e.g. wounds, eczema); blood and lymphatic disorders (e.g. anemia, hemophilia); etc.

[0707] Diseases characterized by dysfunctional or aberrant protein activity include cystic fibrosis, sickle cell anemia, epidermolysis bullosa, amyotrophic lateral sclerosis, and glucose-6-phosphate dehydrogenase deficiency. The present invention provides a method for treating such conditions or diseases in a subject by introducing nucleic acid or cell-based therapeutics containing the polynucleotides provided herein, wherein the polynucleotides encode for a protein that antagonizes or otherwise overcomes the aberrant protein activity present in the cell of the subject. Specific examples of a dysfunctional protein are the missense mutation variants of the cystic fibrosis transmembrane conductance regulator (CFTR) gene, which produce a dysfunctional protein variant of CFTR protein, which causes cystic fibrosis.

[0708] Diseases characterized by missing (or substantially diminished such that proper (normal or physiological protein function does not occur) protein activity include cystic fibrosis, Niemann-Pick type C, β thalassemia major, Duchenne muscular dystrophy, Hurler Syndrome, Hunter Syndrome, and Hemophilia A. Such proteins may not be present, or are essentially non-functional. The present invention provides a method for treating such conditions or diseases in a subject by introducing nucleic acid or cell-based therapeutics containing the polynucleotides provided herein, wherein the polynucleotides encode for a protein that replaces the protein activity missing from the target cells of the subject. Specific examples of a dysfunctional protein are the nonsense mutation variants of the cystic fibrosis transmembrane conductance regulator (CFTR) gene, which produce a nonfunctional protein variant of CFTR protein, which causes cystic fibrosis.

[0709] Thus, provided are methods of treating cystic fibrosis in a mammalian subject by contacting a cell of the subject with a polynucleotide having a translatable region that encodes a functional CFTR polypeptide, under conditions such that an effective amount of the CTFR polypeptide is present in the cell. Preferred target cells are epithelial, endothelial and mesothelial cells, such as the lung, and methods of administration are determined in view of the target tissue; i.e., for lung delivery, the RNA molecules are formulated for administration by inhalation.

[0710] In another embodiment, the present invention provides a method for treating hyperlipidemia in a subject, by introducing into a cell population of the subject with a polynucleotide molecule encoding Sortilin, a protein recently characterized by genomic studies, thereby ameliorating the hyperlipidemia in a subject. The SORT1 gene encodes a trans-Golgi network (TGN) transmembrane protein called Sortilin. Genetic studies have shown that one of five individuals has a single nucleotide polymorphism, rs12740374, in the 1p13 locus of the SORT1 gene that predisposes them to having low levels of low-density lipoprotein (LDL) and very-low-density lipoprotein (VLDL). Each copy of the minor allele, present in about 30% of people, alters LDL cholesterol by 8 mg/dL, while two copies of the minor allele, present in about 5% of the population, lowers LDL cholesterol 16 mg/dL. Carriers of the minor allele have also been shown to have a 40% decreased risk of myocardial infarction. Functional in vivo studies in mice describes that overexpression of SORT1 in mouse liver tissue led to significantly lower LDL-cholesterol levels, as much as 80% lower, and that silencing SORT1 increased LDL cholesterol approximately 200% (Musunuru K et al. From noncoding variant to phenotype via SORT1 at the 1p13 cholesterol locus. Nature 2010; 466: 714-721).

[0711] In another embodiment, the present invention provides a method for treating hematopoietic disorders, cardiovascular disease, oncology, diabetes, cystic fibrosis, neurological diseases, inborn errors of metabolism, skin and systemic disorders, and blindness. The identity of molecular targets to treat these specific diseases has been described (Templeton ed., Gene and Cell Therapy: Therapeutic Mechanisms and Strategies, 3^{rd} Edition, Bota Raton, Fla.: CRC Press; herein incorporated by reference in its entirety).

[0712] Provided herein, are methods to prevent infection and/or sepsis in a subject at risk of developing infection and/or sepsis, the method comprising administering to a subject in need of such prevention a composition comprising a polynucleotide precursor encoding an anti-microbial polypeptide (e.g., an anti-bacterial polypeptide), or a partially or fully processed form thereof in an amount sufficient to prevent infection and/or sepsis. In certain embodiments, the subject at risk of developing infection and/or sepsis may be a cancer patient. In certain embodiments, the cancer patient may have undergone a conditioning regimen. In some embodiments, the conditioning regiment may include, but is not limited to, chemotherapy, radiation therapy, or both. As a non-limiting example, a polynucleotide can encode Protein C, its zymogen or prepro-protein, the activated form of Protein C (APC) or variants of Protein C which are known in the art. The polynucleotides may be chemically modified and delivered to cells. Non-limiting examples of polypeptides which may be encoded within the chemically polynucleotides of the present invention include those taught in U.S. Pat. Nos. 7,226,999; 7,498,305; 6,630,138 each of which is incorporated herein by reference in its entirety. These patents teach Protein C like molecules, variants and derivatives, any of which may be encoded within the chemically modified molecules of the present invention.

[0713] Further provided herein, are methods to treat infection and/or sepsis in a subject, the method comprising administering to a subject in need of such treatment a composition comprising a polynucleotide precursor encoding an anti-microbial polypeptide (e.g., an anti-bacterial polypeptide), e.g., an anti-microbial polypeptide described herein, or a partially or fully processed form thereof in an amount sufficient to treat an infection and/or sepsis. In certain embodiments, the subject in need of treatment is a cancer patient. In certain embodiments, the cancer patient has undergone a conditioning regimen. In some embodiments, the conditioning regiment may include, but is not limited to, chemotherapy, radiation therapy, or both.

[0714] In certain embodiments, the subject may exhibits acute or chronic microbial infections (e.g., bacterial infections). In certain embodiments, the subject may have received or may be receiving a therapy. In certain embodiments, the therapy may include, but is not limited to, radiotherapy, chemotherapy, steroids, ultraviolet radiation, or a combination thereof. In certain embodiments, the patient may suffer from a microvascular disorder. In some embodiments, the microvascular disorder may be diabetes. In certain embodiments, the patient may have a wound. In some embodiments, the wound may be an ulcer. In a specific embodiment, the wound may be a diabetic foot ulcer. In certain embodiments, the subject may have one or more burn wounds. In certain embodiments, the administration may be local or systemic. In certain embodiments, the administration may be subcutaneous. In certain embodiments, the administration may be intravenous. In certain embodiments, the administration may be oral. In certain embodiments, the administration may be topical. In certain embodiments, the administration may be by inhalation. In certain embodiments, the administration may be rectal. In certain embodiments, the administration may be vaginal.

[0715] Other aspects of the present disclosure relate to transplantation of cells containing polynucleotides to a mammalian subject. Administration of cells to mammalian subjects is known to those of ordinary skill in the art, and include, but is not limited to, local implantation (e.g., topical or subcutaneous administration), organ delivery or systemic injection (e.g., intravenous injection or inhalation), and the formulation of cells in pharmaceutically acceptable carrier. Such compositions containing polynucleotides can be formulated for administration intramuscularly, transarterially, intraperitoneally, intravenously, intranasally, subcutaneously, endoscopically, transdermally, or intrathecally. In some embodiments, the composition may be formulated for extended release.

[0716] The subject to whom the therapeutic agent may be administered suffers from or may be at risk of developing a disease, disorder, or deleterious condition. Provided are methods of identifying, diagnosing, and classifying subjects on these bases, which may include clinical diagnosis, biomarker levels, genome-wide association studies (GWAS), and other methods known in the art.

[0717] In another embodiment, it may be useful to optimize the expression of a specific polypeptide in a cell line or collection of cell lines of potential interest, particularly a polypeptide of interest such as a protein variant of a reference protein having a known activity. In one embodiment, provided is a method of optimizing expression of a polypeptide of interest in a target cell, by providing a plurality of target cell types, and independently contacting with each of the plurality of target cell types a polynucleotide encoding a polypeptide. Additionally, culture conditions may be altered to increase protein production efficiency. Subsequently, the presence and/or level of the polypeptide of interest in the plurality of target cell types is detected and/or quantitated, allowing for the optimization of a polypeptide of interest's expression by selection of an efficient target cell and cell culture conditions relating thereto. Such methods may be useful when the polypeptide of interest contains one or more post-translational modifications or has substantial tertiary structure, which often complicate efficient protein production.

### Protein Recovery

[0718] The protein of interest may be preferably recovered from the culture medium as a secreted polypeptide, or it can be recovered from host cell lysates if expressed without a secretory signal. It may be necessary to purify the protein of interest from other recombinant proteins and host cell proteins in a way that substantially homogenous preparations of the protein of interest are obtained. The cells and/or particulate cell debris may be removed from the culture medium or lysate. The product of interest may then be purified from contaminant soluble proteins, polypeptides and nucleic acids by, for example, fractionation on immunoaffinity or ion-exchange columns, ethanol precipitation, reverse phase HPLC (RP-HPLC), SEPHADEX® chromatography, chromatography on silica or on a cation exchange resin such as DEAE. Methods of purifying a protein heterologous expressed by a host cell are well known in the art.

[0719] Methods and compositions described herein may be used to produce proteins which are capable of attenuating or blocking the endogenous agonist biological response and/or antagonizing a receptor or signaling molecule in a mammalian subject. For example, IL-12 and IL-23 receptor signaling may be enhanced in chronic autoimmune disorders such as multiple sclerosis and inflammatory diseases such as rheumatoid arthritis, psoriasis, lupus erythematosus, ankylosing spondylitis and Chron's disease (Kikly K, Liu L, Na S, Sedgwich J D (2006) Cur. Opin. Immunol. 18(6): 670-5). In another embodiment, a nucleic acid encodes an antagonist for chemokine receptors. Chemokine receptors CXCR-4 and CCR-5 are required for HIV enry into host cells (Arenzana-Seisdedos F et al, (1996) Nature. October 3; 383 (6599):400).

### Gene Silencing

[0720] The polynucleotides described herein are useful to silence (i.e., prevent or substantially reduce) expression of one or more target genes in a cell population. A polynucleotide encoding a polypeptide of interest capable of directing sequence-specific histone H3 methylation is introduced into the cells in the population under conditions such that the polypeptide is translated and reduces gene transcription of a target gene via histone H3 methylation and subsequent heterochromatin formation. In some embodiments, the silencing mechanism is performed on a cell population present in a mammalian subject. By way of non-limiting example, a useful target gene is a mutated Janus Kinase-2 family member, wherein the mammalian subject expresses the mutant target gene suffers from a myeloproliferative disease resulting from aberrant kinase activity.

[0721] Co-administration of polynucleotides and RNAi agents are also provided herein.

### Modulation of Biological Pathways

[0722] The rapid translation polynucleotides introduced into cells provides a desirable mechanism of modulating target biological pathways. Such modulation includes antagonism or agonism of a given pathway. In one embodiment, a method is provided for antagonizing a biological pathway in a cell by contacting the cell with an effective amount of a composition comprising a polynucleotide encoding a polypeptide of interest, under conditions such that the polynucleotides are localized into the cell and the polypeptide is capable of being translated in the cell from the polynucleotides, wherein the polypeptide inhibits the activity of a polypeptide functional in the biological pathway. Exemplary biological pathways are those defective in an autoimmune or inflammatory disorder such as multiple sclerosis, rheumatoid arthritis, psoriasis, lupus erythematosus, ankylosing spondylitis colitis, or Crohn's disease; in particular, antagonism of the IL-12 and IL-23 signaling pathways are of particular utility. (See Kikly K, Liu L, Na S, Sedgwick J D (2006) Curr. Opin. Immunol. 18 (6): 670-5).

[0723] Further, provided are polynucleotides encoding an antagonist for chemokine receptors; chemokine receptors CXCR-4 and CCR-5 are required for, e.g., HIV entry into host cells (Arenzana-Seisdedos F et al, (1996) Nature. October 3; 383(6599):400).

[0724] Alternatively, provided are methods of agonizing a biological pathway in a cell by contacting the cell with an effective amount of a polynucleotide encoding a recombinant polypeptide under conditions such that the nucleic acid is localized into the cell and the recombinant polypeptide is capable of being translated in the cell from the nucleic acid, and the recombinant polypeptide induces the activity of a polypeptide functional in the biological pathway. Exemplary agonized biological pathways include pathways that modulate cell fate determination. Such agonization is reversible or, alternatively, irreversible.

### Expression of Ligand or Receptor on Cell Surface

[0725] In some aspects and embodiments of the aspects described herein, the polynucleotides described herein can be used to express a ligand or ligand receptor on the surface of a cell (e.g., a homing moiety). A ligand or ligand receptor moiety attached to a cell surface can permit the cell to have a desired biological interaction with a tissue or an agent in vivo. A ligand can be an antibody, an antibody fragment, an aptamer, a peptide, a vitamin, a carbohydrate, a protein or polypeptide, a receptor, e.g., cell-surface receptor, an adhesion molecule, a glycoprotein, a sugar residue, a therapeutic agent, a drug, a glycosaminoglycan, or any combination thereof. For example, a ligand can be an antibody that recognizes a cancer-cell specific antigen, rendering the cell capable of preferentially interacting with tumor cells to permit tumor-specific localization of a modified cell. A ligand can confer the ability of a cell composition to accumulate in a tissue to be treated, since a preferred ligand may be capable of interacting with a target molecule on the external face of a tissue to be treated. Ligands having limited cross-reactivity to other tissues are generally preferred.

[0726] In some cases, a ligand can act as a homing moiety which permits the cell to target to a specific tissue or interact with a specific ligand. Such homing moieties can include, but are not limited to, any member of a specific binding pair, antibodies, monoclonal antibodies, or derivatives or analogs thereof, including without limitation: Fv fragments, single chain Fv (scFv) fragments, Fab′ fragments, F(ab′)2 fragments, single domain antibodies, camelized antibodies and antibody fragments, humanized antibodies and antibody fragments, and multivalent versions of the foregoing; multivalent binding reagents including without limitation: monospecific or bispecific antibodies, such as disulfide stabilized Fv fragments, scFv tandems ((SCFV)2 fragments), diabodies, tribodies or tetrabodies, which typically are covalently linked or otherwise stabilized (i.e., leucine zipper or helix stabilized) scFv fragments; and other homing moieties include for example, aptamers, receptors, and fusion proteins.

[0727] In some embodiments, the homing moiety may be a surface-bound antibody, which can permit tuning of cell targeting specificity. This is especially useful since highly specific antibodies can be raised against an epitope of interest for the desired targeting site. In one embodiment, multiple antibodies are expressed on the surface of a cell, and each antibody can have a different specificity for a desired target. Such approaches can increase the avidity and specificity of homing interactions.

[0728] A skilled artisan can select any homing moiety based on the desired localization or function of the cell, for example an estrogen receptor ligand, such as tamoxifen, can target cells to estrogen-dependent breast cancer cells that have an increased number of estrogen receptors on the cell surface. Other non-limiting examples of ligand/receptor interactions include CCRI (e.g., for treatment of inflamed joint tissues or brain in rheumatoid arthritis, and/or multiple sclerosis), CCR7, CCR8 (e.g., targeting to lymph node tissue), CCR6, CCR9, CCR10 (e.g., to target to intestinal tissue), CCR4, CCR10 (e.g., for targeting to skin), CXCR4 (e.g., for general enhanced transmigration), HCELL (e.g., for treatment of inflammation and inflammatory disorders, bone marrow), Alpha4beta7 (e.g., for intestinal mucosa targeting), VLA-4/VCAM-1 (e.g., targeting to endothelium). In general, any receptor involved in targeting (e.g., cancer metastasis) can be harnessed for use in the methods and compositions described herein.

### VI. KITS AND DEVICES

### Kits

[0729] The invention provides a variety of kits for conveniently and/or effectively carrying out methods of the present invention. Typically kits will comprise sufficient amounts and/or numbers of components to allow a user to perform multiple treatments of a subject(s) and/or to perform multiple experiments.

[0730] In one aspect, the present invention provides kits comprising the molecules (polynucleotides) of the invention. In one embodiment, the kit comprises one or more functional antibodies or function fragments thereof.

[0731] Said kits can be for protein production, comprising polynucleotides comprising a translatable region. The kit may further comprise packaging and instructions and/or a delivery agent to form a formulation composition. The delivery agent may comprise a saline, a buffered solution, a lipidoid or any delivery agent disclosed herein.

[0732] In one embodiment, the buffer solution may include sodium chloride, calcium chloride, phosphate and/or EDTA. In another embodiment, the buffer solution may include, but is not limited to, saline, saline with 2 mM calcium, 5% sucrose, 5% sucrose with 2 mM calcium, 5% Mannitol, 5% Mannitol with 2 mM calcium, Ringer's lactate, sodium chloride, sodium chloride with 2 mM calcium and mannose (See e.g., U.S. Pub. No. 20120258046; herein incorporated by reference in its entirety). In a further embodiment, the buffer solutions may be precipitated or it may be lyophilized. The amount of each component may be varied to enable consistent, reproducible higher concentration saline or simple buffer formulations. The components may also be varied in order to increase the stability of modified RNA in the buffer solution over a period of time and/or under a variety of conditions. In one aspect, the present invention provides kits for protein production, comprising: a polynucleotide comprising a translatable region, provided in an amount effective to produce a desired amount of a protein encoded by the translatable region when introduced into a target cell; a second polynucleotide comprising an inhibitory nucleic acid, provided in an amount effective to substantially inhibit the innate immune response of the cell; and packaging and instructions.

[0733] In one aspect, the present invention provides kits for protein production, comprising a polynucleotide comprising a translatable region, wherein the polynucleotide exhibits reduced degradation by a cellular nuclease, and packaging and instructions.

[0734] In one aspect, the present invention provides kits for protein production, comprising a polynucleotide comprising a translatable region, wherein the polynucleotide exhibits reduced degradation by a cellular nuclease, and a mammalian cell suitable for translation of the translatable region of the first nucleic acid.

### Devices

[0735] The present invention provides for devices which may incorporate polynucleotides that encode polypeptides of interest. These devices contain in a stable formulation the reagents to synthesize a polynucleotide in a formulation available to be immediately delivered to a subject in need thereof, such as a human patient

[0736] Devices for administration may be employed to deliver the polynucleotides of the present invention according to single, multi- or split-dosing regimens taught herein. Such devices are taught in, for example, International Application PCT/US2013/30062 filed Mar. 9, 2013 (Attorney Docket Number M300), the contents of which are incorporated herein by reference in their entirety.

[0737] Method and devices known in the art for multi-administration to cells, organs and tissues are contemplated for use in conjunction with the methods and compositions disclosed herein as embodiments of the present invention. These include, for example, those methods and devices having multiple needles, hybrid devices employing for example lumens or catheters as well as devices utilizing heat, electric current or radiation driven mechanisms.

[0738] According to the present invention, these multi-administration devices may be utilized to deliver the single, multi- or split doses contemplated herein. Such devices are taught for example in, International Application PCT/US2013/30062 filed Mar. 9, 2013 (Attorney Docket Number M300), the contents of which are incorporated herein by reference in their entirety.

[0739] In one embodiment, the polynucleotide is administered subcutaneously or intramuscularly via at least 3 needles to three different, optionally adjacent, sites simultaneously, or within a 60 minutes period (e.g., administration to 4, 5, 6, 7, 8, 9, or 10 sites simultaneously or within a 60 minute period).

Methods and Devices Utilizing Catheters and/or Lumens

[0740] Methods and devices using catheters and lumens may be employed to administer the polynucleotides of the present invention on a single, multi- or split dosing schedule. Such methods and devices are described in International Application PCT/US2013/30062 filed Mar. 9, 2013 (Attorney Docket Number M300), the contents of which are incorporated herein by reference in their entirety.

### Methods and Devices Utilizing Electrical Current

[0741] Methods and devices utilizing electric current may be employed to deliver the polynucleotides of the present invention according to the single, multi- or split dosing regimens taught herein. Such methods and devices are described in International Application PCT/US2013/30062 filed Mar. 9, 2013 (Attorney Docket Number M300), the contents of which are incorporated herein by reference in their entirety.

### VII. DEFINITIONS

[0742] At various places in the present specification, substituents of compounds of the present disclosure are disclosed in groups or in ranges. It is specifically intended that the present disclosure include each and every individual subcombination of the members of such groups and ranges

[0743] About: As used herein, the term “about” means+/−10% of the recited value.

[0744] Administered in combination: As used herein, the term “administered in combination” or “combined administration” means that two or more agents are administered to a subject at the same time or within an interval such that there may be an overlap of an effect of each agent on the patient. In some embodiments, they are administered within about 60, 30, 15, 10, 5, or 1 minute of one another. In some embodiments, the administrations of the agents are spaced sufficiently closely together such that a combinatorial (e.g., a synergistic) effect is achieved.

[0745] Adjuvant: As used herein, the term “adjuvant” means a substance that enhances a subject's immune response to an antigen.

[0746] Animal: As used herein, the term “animal” refers to any member of the animal kingdom. In some embodiments, “animal” refers to humans at any stage of development. In some embodiments, “animal” refers to non-human animals at any stage of development. In certain embodiments, the non-human animal is a mammal (e.g., a rodent, a mouse, a rat, a rabbit, a monkey, a dog, a cat, a sheep, cattle, a primate, or a pig). In some embodiments, animals include, but are not limited to, mammals, birds, reptiles, amphibians, fish, and worms. In some embodiments, the animal is a transgenic animal, genetically-engineered animal, or a clone.

[0747] Antigen: As used herein, the term “antigen” refers to the substance that binds specifically to the respective antibody. An antigen may originate either from the body, such as cancer antigen used herein, or from the external environment, for instance, from infectious agents.

[0748] Antigens of interest or desired antigens: As used herein, the terms “antigens of interest” or “desired antigens” include those proteins and other biomolecules provided herein that are immunospecifically bound by the antibodies and fragments, mutants, variants, and alterations thereof described herein. Examples of antigens of interest include, but are not limited to, insulin, insulin-like growth factor, hGH, tPA, cytokines, such as interleukins (IL), e.g., IL-1, IL-2, IL-3, IL-4, IL-5, IL-6, IL-7, IL-8, IL-9, IL-10, IL-11, IL-12, IL-13, IL-14, IL-15, IL-16, IL-17, IL-18, interferon (IFN) alpha, IFN beta, IFN gamma, IFN omega or IFN tau, tumor necrosis factor (TNF), such as TNF alpha and TNF beta, TNF gamma, TRAIL; G-CSF, GM-CSF, M-CSF, MCP-1 and VEGF.

[0749] Approximately: As used herein, the term “approximately” or “about,” as applied to one or more values of interest, refers to a value that is similar to a stated reference value. In certain embodiments, the term “approximately” or “about” refers to a range of values that fall within 25%, 20%, 19%, 18%, 17%, 16%, 15%, 14%, 13%, 12%, 11%, 10%, 9%, 8%, 7%, 6%, 5%, 4%, 3%, 2%, 1%, or less in either direction (greater than or less than) of the stated reference value unless otherwise stated or otherwise evident from the context (except where such number would exceed 100% of a possible value).

[0750] Associated with: As used herein, the terms “associated with,” “conjugated,” “linked,” “attached,” and “tethered,” when used with respect to two or more moieties, means that the moieties are physically associated or connected with one another, either directly or via one or more additional moieties that serves as a linking agent, to form a structure that is sufficiently stable so that the moieties remain physically associated under the conditions in which the structure is used, e.g., physiological conditions. An “association” need not be strictly through direct covalent chemical bonding. It may also suggest ionic or hydrogen bonding or a hybridization based connectivity sufficiently stable such that the “associated” entities remain physically associated.

[0751] Bifunctional: As used herein, the term “bifunctional” refers to any substance, molecule or moiety which is capable of or maintains at least two functions. The functions may effect the same outcome or a different outcome. The structure that produces the function may be the same or different. For example, bifunctional modified RNAs of the present invention may encode a cytotoxic peptide (a first function) while those nucleosides which comprise the encoding RNA are, in and of themselves, cytotoxic (second function). In this example, delivery of the bifunctional modified RNA to a cancer cell would produce not only a peptide or protein molecule which may ameliorate or treat the cancer but would also deliver a cytotoxic payload of nucleosides to the cell should degradation, instead of translation of the modified RNA, occur.

[0752] Biocompatible: As used herein, the term “biocompatible” means compatible with living cells, tissues, organs or systems posing little to no risk of injury, toxicity or rejection by the immune system.

[0753] Biodegradable: As used herein, the term “biodegradable” means capable of being broken down into innocuous products by the action of living things.

[0754] Biologically active: As used herein, the phrase “biologically active” refers to a characteristic of any substance that has activity in a biological system and/or organism. For instance, a substance that, when administered to an organism, has a biological effect on that organism, is considered to be biologically active. In particular embodiments, a polynucleotide of the present invention may be considered biologically active if even a portion of the polynucleotides are biologically active or mimics an activity considered biologically relevant.

[0755] Cancer stem cells: As used herein, “cancer stem cells” are cells that can undergo self-renewal and/or abnormal proliferation and differentiation to form a tumor.

[0756] Chimera: As used herein, “chimera” is an entity having two or more incongruous or heterogeneous parts or regions.

[0757] Chimeric polynucleotide: As used herein, “chimeric polynucleotides” are those nucleic acid polymers having portions or regions which differ in size and/or chemical modification pattern, chemical modification position, chemical modification percent or chemical modification population and combinations of the foregoing.

[0758] Compound: As used herein, the term “compound,” is meant to include all stereoisomers, geometric isomers, tautomers, and isotopes of the structures depicted.

[0759] The compounds described herein can be asymmetric (e.g., having one or more stereocenters). All stereoisomers, such as enantiomers and diastereomers, are intended unless otherwise indicated. Compounds of the present disclosure that contain asymmetrically substituted carbon atoms can be isolated in optically active or racemic forms. Methods on how to prepare optically active forms from optically active starting materials are known in the art, such as by resolution of racemic mixtures or by stereoselective synthesis. Many geometric isomers of olefins, C═N double bonds, and the like can also be present in the compounds described herein, and all such stable isomers are contemplated in the present disclosure. Cis and trans geometric isomers of the compounds of the present disclosure are described and may be isolated as a mixture of isomers or as separated isomeric forms.

[0760] Compounds of the present disclosure also include tautomeric forms. Tautomeric forms result from the swapping of a single bond with an adjacent double bond and the concomitant migration of a proton. Tautomeric forms include prototropic tautomers which are isomeric protonation states having the same empirical formula and total charge. Examples prototropic tautomers include ketone—enol pairs, amide—imidic acid pairs, lactam—lactim pairs, amide—imidic acid pairs, enamine—imine pairs, and annular forms where a proton can occupy two or more positions of a heterocyclic system, such as, 1H- and 3H-imidazole, 1H-, 2H- and 4H-1,2,4-triazole, 1H- and 2H-isoindole, and 1H- and 2H-pyrazole. Tautomeric forms can be in equilibrium or sterically locked into one form by appropriate substitution.

[0761] Compounds of the present disclosure also include all of the isotopes of the atoms occurring in the intermediate or final compounds. “Isotopes” refers to atoms having the same atomic number but different mass numbers resulting from a different number of neutrons in the nuclei. For example, isotopes of hydrogen include tritium and deuterium.

[0762] The compounds and salts of the present disclosure can be prepared in combination with solvent or water molecules to form solvates and hydrates by routine methods.

[0763] Committed: As used herein, the term “committed” means, when referring to a cell, when the cell is far enough into the differentiation pathway where, under normal circumstances, it will continue to differentiate into a specific cell type or subset of cell type instead of into a different cell type or reverting to a lesser differentiated cell type.

[0764] Conserved: As used herein, the term “conserved” refers to nucleotides or amino acid residues of a polynucleotide sequence or polypeptide sequence, respectively, that are those that occur unaltered in the same position of two or more sequences being compared. Nucleotides or amino acids that are relatively conserved are those that are conserved amongst more related sequences than nucleotides or amino acids appearing elsewhere in the sequences.

[0765] In some embodiments, two or more sequences are said to be “completely conserved” if they are 100% identical to one another. In some embodiments, two or more sequences are said to be “highly conserved” if they are at least 70% identical, at least 80% identical, at least 90% identical, or at least 95% identical to one another. In some embodiments, two or more sequences are said to be “highly conserved” if they are about 70% identical, about 80% identical, about 90% identical, about 95%, about 98%, or about 99% identical to one another. In some embodiments, two or more sequences are said to be “conserved” if they are at least 30% identical, at least 40% identical, at least 50% identical, at least 60% identical, at least 70% identical, at least 80% identical, at least 90% identical, or at least 95% identical to one another. In some embodiments, two or more sequences are said to be “conserved” if they are about 30% identical, about 40% identical, about 50% identical, about 60% identical, about 70% identical, about 80% identical, about 90% identical, about 95% identical, about 98% identical, or about 99% identical to one another. Conservation of sequence may apply to the entire length of an polynucleotide or polypeptide or may apply to a portion, region or feature thereof.

[0766] Controlled Release: As used herein, the term “controlled release” refers to a pharmaceutical composition or compound release profile that conforms to a particular pattern of release to effect a therapeutic outcome.

[0767] Cyclic or Cyclized: As used herein, the term “cyclic” refers to the presence of a continuous loop. Cyclic molecules need not be circular, only joined to form an unbroken chain of subunits. Cyclic molecules such as the engineered RNA or mRNA of the present invention may be single units or multimers or comprise one or more components of a complex or higher order structure.

[0768] Cytostatic: As used herein, “cytostatic” refers to inhibiting, reducing, suppressing the growth, division, or multiplication of a cell (e.g., a mammalian cell (e.g., a human cell)), bacterium, virus, fungus, protozoan, parasite, prion, or a combination thereof.

[0769] Cytotoxic: As used herein, “cytotoxic” refers to killing or causing injurious, toxic, or deadly effect on a cell (e.g., a mammalian cell (e.g., a human cell)), bacterium, virus, fungus, protozoan, parasite, prion, or a combination thereof.

[0770] Delivery: As used herein, “delivery” refers to the act or manner of delivering a compound, substance, entity, moiety, cargo or payload.

[0771] Delivery Agent: As used herein, “delivery agent” refers to any substance which facilitates, at least in part, the in vivo delivery of a polynucleotide to targeted cells.

[0772] Destabilized: As used herein, the term “destable,” “destabilize,” or “destabilizing region” means a region or molecule that is less stable than a starting, wild-type or native form of the same region or molecule.

[0773] Detectable label: As used herein, “detectable label” refers to one or more markers, signals, or moieties which are attached, incorporated or associated with another entity that is readily detected by methods known in the art including radiography, fluorescence, chemiluminescence, enzymatic activity, absorbance and the like. Detectable labels include radioisotopes, fluorophores, chromophores, enzymes, dyes, metal ions, ligands such as biotin, avidin, streptavidin and haptens, quantum dots, and the like. Detectable labels may be located at any position in the peptides or proteins disclosed herein. They may be within the amino acids, the peptides, or proteins, or located at the N- or C-termini.

[0774] Diastereomer: As used herein, the term “diastereomer,” means stereoisomers that are not mirror images of one another and are non-superimposable on one another.

[0775] Digest: As used herein, the term “digest” means to break apart into smaller pieces or components. When referring to polypeptides or proteins, digestion results in the production of peptides.

[0776] Differentiated cell: As used herein, the term “differentiated cell” refers to any somatic cell that is not, in its native form, pluripotent. Differentiated cell also encompasses cells that are partially differentiated.

[0777] Differentiation: As used herein, the term “differentiation factor” refers to a developmental potential altering factor such as a protein, RNA or small molecule that can induce a cell to differentiate to a desired cell-type.

[0778] Differentiate: As used herein, “differentiate” refers to the process where an uncommitted or less committed cell acquires the features of a committed cell.

[0779] Distal: As used herein, the term “distal” means situated away from the center or away from a point or region of interest.

[0780] Dosing regimen: As used herein, a “dosing regimen” is a schedule of administration or physician determined regimen of treatment, prophylaxis, or palliative care.

[0781] Dose splitting factor (DSF)-ratio of PUD of dose split treatment divided by PUD of total daily dose or single unit dose. The value is derived from comparison of dosing regimens groups.

[0782] Enantiomer: As used herein, the term “enantiomer” means each individual optically active form of a compound of the invention, having an optical purity or enantiomeric excess (as determined by methods standard in the art) of at least 80% (i.e., at least 90% of one enantiomer and at most 10% of the other enantiomer), preferably at least 90% and more preferably at least 98%.

[0783] Encapsulate: As used herein, the term “encapsulate” means to enclose, surround or encase.

[0784] Encoded protein cleavage signal: As used herein, “encoded protein cleavage signal” refers to the nucleotide sequence which encodes a protein cleavage signal.

[0785] Engineered: As used herein, embodiments of the invention are “engineered” when they are designed to have a feature or property, whether structural or chemical, that varies from a starting point, wild type or native molecule.

[0786] Effective Amount: As used herein, the term “effective amount” of an agent is that amount sufficient to effect beneficial or desired results, for example, clinical results, and, as such, an “effective amount” depends upon the context in which it is being applied. For example, in the context of administering an agent that treats cancer, an effective amount of an agent is, for example, an amount sufficient to achieve treatment, as defined herein, of cancer, as compared to the response obtained without administration of the agent.

[0787] Exosome: As used herein, “exosome” is a vesicle secreted by mammalian cells or a complex involved in RNA degradation.

[0788] Expression: As used herein, “expression” of a nucleic acid sequence refers to one or more of the following events: (1) production of an RNA template from a DNA sequence (e.g., by transcription); (2) processing of an RNA transcript (e.g., by splicing, editing, 5′ cap formation, and/or 3′ end processing); (3) translation of an RNA into a polypeptide or protein; and (4) post-translational modification of a polypeptide or protein.

[0789] Feature: As used herein, a “feature” refers to a characteristic, a property, or a distinctive element.

[0790] Formulation: As used herein, a “formulation” includes at least a polynucleotide and a delivery agent.

[0791] Fragment: A “fragment,” as used herein, refers to a portion. For example, fragments of proteins may comprise polypeptides obtained by digesting full-length protein isolated from cultured cells.

[0792] Functional: As used herein, a “functional” biological molecule is a biological molecule in a form in which it exhibits a property and/or activity by which it is characterized.

[0793] Homology: As used herein, the term “homology” refers to the overall relatedness between polymeric molecules, e.g. between nucleic acid molecules (e.g. DNA molecules and/or RNA molecules) and/or between polypeptide molecules. In some embodiments, polymeric molecules are considered to be “homologous” to one another if their sequences are at least 25%, 30%, 35%, 40%, 45%, 50%, 55%, 60%, 65%, 70%, 75%, 80%, 85%, 90%, 95%, or 99% identical or similar. The term “homologous” necessarily refers to a comparison between at least two sequences (polynucleotide or polypeptide sequences). In accordance with the invention, two polynucleotide sequences are considered to be homologous if the polypeptides they encode are at least about 50%, 60%, 70%, 80%, 90%, 95%, or even 99% for at least one stretch of at least about 20 amino acids. In some embodiments, homologous polynucleotide sequences are characterized by the ability to encode a stretch of at least 4-5 uniquely specified amino acids. For polynucleotide sequences less than 60 nucleotides in length, homology is determined by the ability to encode a stretch of at least 4-5 uniquely specified amino acids. In accordance with the invention, two protein sequences are considered to be homologous if the proteins are at least about 50%, 60%, 70%, 80%, or 90% identical for at least one stretch of at least about 20 amino acids.

[0794] Identity: As used herein, the term “identity” refers to the overall relatedness between polymeric molecules, e.g., between polynucleotide molecules (e.g. DNA molecules and/or RNA molecules) and/or between polypeptide molecules. Calculation of the percent identity of two polynucleotide sequences, for example, can be performed by aligning the two sequences for optimal comparison purposes (e.g., gaps can be introduced in one or both of a first and a second nucleic acid sequences for optimal alignment and non-identical sequences can be disregarded for comparison purposes). In certain embodiments, the length of a sequence aligned for comparison purposes is at least 30%, at least 40%, at least 50%, at least 60%, at least 70%, at least 80%, at least 90%, at least 95%, or 100% of the length of the reference sequence. The nucleotides at corresponding nucleotide positions are then compared. When a position in the first sequence is occupied by the same nucleotide as the corresponding position in the second sequence, then the molecules are identical at that position. The percent identity between the two sequences is a function of the number of identical positions shared by the sequences, taking into account the number of gaps, and the length of each gap, which needs to be introduced for optimal alignment of the two sequences. The comparison of sequences and determination of percent identity between two sequences can be accomplished using a mathematical algorithm. For example, the percent identity between two nucleotide sequences can be determined using methods such as those described in Computational Molecular Biology, Lesk, A. M., ed., Oxford University Press, New York, 1988; Biocomputing: Informatics and Genome Projects, Smith, D. W., ed., Academic Press, New York, 1993; Sequence Analysis in Molecular Biology, von Heinje, G., Academic Press, 1987; Computer Analysis of Sequence Data, Part I, Griffin, A. M., and Griffin, H. G., eds., Humana Press, New Jersey, 1994; and Sequence Analysis Primer, Gribskov, M. and Devereux, J., eds., M Stockton Press, New York, 1991; each of which is incorporated herein by reference. For example, the percent identity between two nucleotide sequences can be determined using the algorithm of Meyers and Miller (CABIOS, 1989, 4:11-17), which has been incorporated into the ALIGN program (version 2.0) using a PAM120 weight residue table, a gap length penalty of 12 and a gap penalty of 4. The percent identity between two nucleotide sequences can, alternatively, be determined using the GAP program in the GCG software package using an NWSgapdna. CMP matrix. Methods commonly employed to determine percent identity between sequences include, but are not limited to those disclosed in Carillo, H., and Lipman, D., SIAM J Applied Math., 48:1073 (1988); incorporated herein by reference. Techniques for determining identity are codified in publicly available computer programs. Exemplary computer software to determine homology between two sequences include, but are not limited to, GCG program package, Devereux, J., et al., Nucleic Acids Research, 12(1), 387 (1984)), BLASTP, BLASTN, and FASTA Altschul, S. F. et al., J. Molec. Biol., 215, 403 (1990)).

[0795] Infectious Agent: As used herein, the phrase “infectious agent” means an agent capable of producing an infection.

[0796] Inhibit expression of a gene: As used herein, the phrase “inhibit expression of a gene” means to cause a reduction in the amount of an expression product of the gene. The expression product can be an RNA transcribed from the gene (e.g., an mRNA) or a polypeptide translated from an mRNA transcribed from the gene. Typically a reduction in the level of an mRNA results in a reduction in the level of a polypeptide translated therefrom. The level of expression may be determined using standard techniques for measuring mRNA or protein.

[0797] Infectious agent: As used herein, an “infectious agent” refers to any microorganism, virus, infectious substance, or biological product that may be engineered as a result of biotechnology, or any naturally occurring or bioengineered component of any such microorganism, virus, infectious substance, or biological product, can cause emerging and contagious disease, death or other biological malfunction in a human, an animal, a plant or another living organism.

[0798] Influenza: As used herein, “influenza” or “flu” is an infectious disease of birds and mammals caused by RNA viruses of the family Orthomyxoviridae, the influenza viruses.

[0799] Isomer: As used herein, the term “isomer” means any tautomer, stereoisomer, enantiomer, or diastereomer of any compound of the invention. It is recognized that the compounds of the invention can have one or more chiral centers and/or double bonds and, therefore, exist as stereoisomers, such as double-bond isomers (i.e., geometric E/Z isomers) or diastereomers (e.g., enantiomers (i.e., (+) or (−)) or cis/trans isomers). According to the invention, the chemical structures depicted herein, and therefore the compounds of the invention, encompass all of the corresponding stereoisomers, that is, both the stereomerically pure form (e.g., geometrically pure, enantiomerically pure, or diastereomerically pure) and enantiomeric and stereoisomeric mixtures, e.g., racemates. Enantiomeric and stereoisomeric mixtures of compounds of the invention can typically be resolved into their component enantiomers or stereoisomers by well-known methods, such as chiral-phase gas chromatography, chiral-phase high performance liquid chromatography, crystallizing the compound as a chiral salt complex, or crystallizing the compound in a chiral solvent. Enantiomers and stereoisomers can also be obtained from stereomerically or enantiomerically pure intermediates, reagents, and catalysts by well-known asymmetric synthetic methods.

[0800] In vitro: As used herein, the term “in vitro” refers to events that occur in an artificial environment, e.g., in a test tube or reaction vessel, in cell culture, in a Petri dish, etc., rather than within an organism (e.g., animal, plant, or microbe).

[0801] In vivo: As used herein, the term “in vivo” refers to events that occur within an organism (e.g., animal, plant, or microbe or cell or tissue thereof).

[0802] Isolated: As used herein, the term “isolated” refers to a substance or entity that has been separated from at least some of the components with which it was associated (whether in nature or in an experimental setting). Isolated substances may have varying levels of purity in reference to the substances from which they have been associated. Isolated substances and/or entities may be separated from at least about 10%, about 20%, about 30%, about 40%, about 50%, about 60%, about 70%, about 80%, about 90%, or more of the other components with which they were initially associated. In some embodiments, isolated agents are more than about 80%, about 85%, about 90%, about 91%, about 92%, about 93%, about 94%, about 95%, about 96%, about 97%, about 98%, about 99%, or more than about 99% pure. As used herein, a substance is “pure” if it is substantially free of other components. Substantially isolated: By “substantially isolated” is meant that the compound is substantially separated from the environment in which it was formed or detected. Partial separation can include, for example, a composition enriched in the compound of the present disclosure. Substantial separation can include compositions containing at least about 50%, at least about 60%, at least about 70%, at least about 80%, at least about 90%, at least about 95%, at least about 97%, or at least about 99% by weight of the compound of the present disclosure, or salt thereof. Methods for isolating compounds and their salts are routine in the art.

[0803] IVT Polynucleotide: As used herein, an “IVT polynucleotide” is a linear polynucleotide which may be made using only in vitro transcription (IVT) enzymatic synthesis methods.

[0804] Linker: As used herein, a “linker” refers to a group of atoms, e.g., 10-1,000 atoms, and can be comprised of the atoms or groups such as, but not limited to, carbon, amino, alkylamino, oxygen, sulfur, sulfoxide, sulfonyl, carbonyl, and imine. The linker can be attached to a modified nucleoside or nucleotide on the nucleobase or sugar moiety at a first end, and to a payload, e.g., a detectable or therapeutic agent, at a second end. The linker may be of sufficient length as to not interfere with incorporation into a nucleic acid sequence. The linker can be used for any useful purpose, such as to form polynucleotide multimers (e.g., through linkage of two or more chimeric polynucleotides molecules or IVT polynucleotides) or polynucleotides conjugates, as well as to administer a payload, as described herein. Examples of chemical groups that can be incorporated into the linker include, but are not limited to, alkyl, alkenyl, alkynyl, amido, amino, ether, thioether, ester, alkylene, heteroalkylene, aryl, or heterocyclyl, each of which can be optionally substituted, as described herein. Examples of linkers include, but are not limited to, unsaturated alkanes, polyethylene glycols (e.g., ethylene or propylene glycol monomeric units, e.g., diethylene glycol, dipropylene glycol, triethylene glycol, tripropylene glycol, tetraethylene glycol, or tetraethylene glycol), and dextran polymers and derivatives thereof., Other examples include, but are not limited to, cleavable moieties within the linker, such as, for example, a disulfide bond (—S—S—) or an azo bond (—N═N—), which can be cleaved using a reducing agent or photolysis. Non-limiting examples of a selectively cleavable bond include an amido bond can be cleaved for example by the use of tris(2-carboxyethyl)phosphine (TCEP), or other reducing agents, and/or photolysis, as well as an ester bond can be cleaved for example by acidic or basic hydrolysis.

[0805] MicroRNA (miRNA) binding site: As used herein, a microRNA (miRNA) binding site represents a nucleotide location or region of a nucleic acid transcript to which at least the “seed” region of a miRNA binds.

[0806] Modified: As used herein “modified” refers to a changed state or structure of a molecule of the invention. Molecules may be modified in many ways including chemically, structurally, and functionally. In one embodiment, the mRNA molecules of the present invention are modified by the introduction of non-natural nucleosides and/or nucleotides, e.g., as it relates to the natural ribonucleotides A, U, G, and C. Noncanonical nucleotides such as the cap structures are not considered “modified” although they differ from the chemical structure of the A, C, G, U ribonucleotides.

[0807] Mucus: As used herein, “mucus” refers to the natural substance that is viscous and comprises mucin glycoproteins.

[0808] Naturally occurring: As used herein, “naturally occurring” means existing in nature without artificial aid.

[0809] Neutralizing antibody: As used herein, a “neutralizing antibody” refers to an antibody which binds to its antigen and defends a cell from an antigen or infectious agent by neutralizing or abolishing any biological activity it has.

[0810] Non-human vertebrate: As used herein, a “non human vertebrate” includes all vertebrates except Homo sapiens, including wild and domesticated species. Examples of non-human vertebrates include, but are not limited to, mammals, such as alpaca, banteng, bison, camel, cat, cattle, deer, dog, donkey, gayal, goat, guinea pig, horse, llama, mule, pig, rabbit, reindeer, sheep water buffalo, and yak.

[0811] Off-target: As used herein, “off target” refers to any unintended effect on any one or more target, gene, or cellular transcript.

[0812] Open reading frame: As used herein, “open reading frame” or “ORF” refers to a sequence which does not contain a stop codon in a given reading frame.

[0813] Operably linked: As used herein, the phrase “operably linked” refers to a functional connection between two or more molecules, constructs, transcripts, entities, moieties or the like.

[0814] Optionally substituted: Herein a phrase of the form “optionally substituted X” (e.g., optionally substituted alkyl) is intended to be equivalent to “X, wherein X is optionally substituted” (e.g., “alkyl, wherein said alkyl is optionally substituted”). It is not intended to mean that the feature “X” (e.g. alkyl) per se is optional.

[0815] Part: As used herein, a “part” or “region” of a polynucleotide is defined as any portion of the polynucleotide which is less than the entire length of the polynucleotide.

[0816] Peptide: As used herein, “peptide” is less than or equal to 50 amino acids long, e.g., about 5, 10, 15, 20, 25, 30, 35, 40, 45, or 50 amino acids long.

[0817] Paratope: As used herein, a “paratope” refers to the antigen-binding site of an antibody.

[0818] Patient: As used herein, “patient” refers to a subject who may seek or be in need of treatment, requires treatment, is receiving treatment, will receive treatment, or a subject who is under care by a trained professional for a particular disease or condition.

[0819] Pharmaceutically acceptable: The phrase “pharmaceutically acceptable” is employed herein to refer to those compounds, materials, compositions, and/or dosage forms which are, within the scope of sound medical judgment, suitable for use in contact with the tissues of human beings and animals without excessive toxicity, irritation, allergic response, or other problem or complication, commensurate with a reasonable benefit/risk ratio.

[0820] Pharmaceutically acceptable excipients: The phrase “pharmaceutically acceptable excipient,” as used herein, refers any ingredient other than the compounds described herein (for example, a vehicle capable of suspending or dissolving the active compound) and having the properties of being substantially nontoxic and non-inflammatory in a patient. Excipients may include, for example: antiadherents, antioxidants, binders, coatings, compression aids, disintegrants, dyes (colors), emollients, emulsifiers, fillers (diluents), film formers or coatings, flavors, fragrances, glidants (flow enhancers), lubricants, preservatives, printing inks, sorbents, suspensing or dispersing agents, sweeteners, and waters of hydration. Exemplary excipients include, but are not limited to: butylated hydroxytoluene (BHT), calcium carbonate, calcium phosphate (dibasic), calcium stearate, croscarmellose, crosslinked polyvinyl pyrrolidone, citric acid, crospovidone, cysteine, ethylcellulose, gelatin, hydroxypropyl cellulose, hydroxypropyl methylcellulose, lactose, magnesium stearate, maltitol, mannitol, methionine, methylcellulose, methyl paraben, microcrystalline cellulose, polyethylene glycol, polyvinyl pyrrolidone, povidone, pregelatinized starch, propyl paraben, retinyl palmitate, shellac, silicon dioxide, sodium carboxymethyl cellulose, sodium citrate, sodium starch glycolate, sorbitol, starch (corn), stearic acid, sucrose, talc, titanium dioxide, vitamin A, vitamin E, vitamin C, and xylitol.

[0821] Pharmaceutically acceptable salts: The present disclosure also includes pharmaceutically acceptable salts of the compounds described herein. As used herein, “pharmaceutically acceptable salts” refers to derivatives of the disclosed compounds wherein the parent compound is modified by converting an existing acid or base moiety to its salt form (e.g., by reacting the free base group with a suitable organic acid). Examples of pharmaceutically acceptable salts include, but are not limited to, mineral or organic acid salts of basic residues such as amines; alkali or organic salts of acidic residues such as carboxylic acids; and the like. Representative acid addition salts include acetate, acetic acid, adipate, alginate, ascorbate, aspartate, benzenesulfonate, benzene sulfonic acid, benzoate, bisulfate, borate, butyrate, camphorate, camphorsulfonate, citrate, cyclopentanepropionate, digluconate, dodecylsulfate, ethanesulfonate, fumarate, glucoheptonate, glycerophosphate, hemisulfate, heptonate, hexanoate, hydrobromide, hydrochloride, hydroiodide, 2-hydroxy-ethanesulfonate, lactobionate, lactate, laurate, lauryl sulfate, malate, maleate, malonate, methanesulfonate, 2-naphthalenesulfonate, nicotinate, nitrate, oleate, oxalate, palmitate, pamoate, pectinate, persulfate, 3-phenylpropionate, phosphate, picrate, pivalate, propionate, stearate, succinate, sulfate, tartrate, thiocyanate, toluenesulfonate, undecanoate, valerate salts, and the like. Representative alkali or alkaline earth metal salts include sodium, lithium, potassium, calcium, magnesium, and the like, as well as nontoxic ammonium, quaternary ammonium, and amine cations, including, but not limited to ammonium, tetramethylammonium, tetraethylammonium, methylamine, dimethylamine, trimethylamine, triethylamine, ethylamine, and the like. The pharmaceutically acceptable salts of the present disclosure include the conventional non-toxic salts of the parent compound formed, for example, from non-toxic inorganic or organic acids. The pharmaceutically acceptable salts of the present disclosure can be synthesized from the parent compound which contains a basic or acidic moiety by conventional chemical methods. Generally, such salts can be prepared by reacting the free acid or base forms of these compounds with a stoichiometric amount of the appropriate base or acid in water or in an organic solvent, or in a mixture of the two; generally, nonaqueous media like ether, ethyl acetate, ethanol, isopropanol, or acetonitrile are preferred. Lists of suitable salts are found in Remington's Pharmaceutical Sciences, 17^{th} ed., Mack Publishing Company, Easton, Pa., 1985, p. 1418, Pharmaceutical Salts: Properties, Selection, and Use, P. H. Stahl and C. G. Wermuth (eds.), Wiley-VCH, 2008, and Berge et al., Journal of Pharmaceutical Science, 66, 1-19 (1977), each of which is incorporated herein by reference in its entirety.

[0822] Pharmaceutically acceptable solvate: The term “pharmaceutically acceptable solvate,” as used herein, means a compound of the invention wherein molecules of a suitable solvent are incorporated in the crystal lattice. A suitable solvent is physiologically tolerable at the dosage administered. For example, solvates may be prepared by crystallization, recrystallization, or precipitation from a solution that includes organic solvents, water, or a mixture thereof. Examples of suitable solvents are ethanol, water (for example, mono-, di-, and tri-hydrates), N-methylpyrrolidinone (NMP), dimethyl sulfoxide (DMSO), N,N′-dimethylformamide (DMF), N,N′-dimethylacetamide (DMAC), 1,3-dimethyl-2-imidazolidinone (DMEU), 1,3-dimethyl-3,4,5,6-tetrahydro-2-(1H)-pyrimidinone (DMPU), acetonitrile (ACN), propylene glycol, ethyl acetate, benzyl alcohol, 2-pyrrolidone, benzyl benzoate, and the like. When water is the solvent, the solvate is referred to as a “hydrate.”

[0823] Pharmacokinetic: As used herein, “pharmacokinetic” refers to any one or more properties of a molecule or compound as it relates to the determination of the fate of substances administered to a living organism. Pharmacokinetics is divided into several areas including the extent and rate of absorption, distribution, metabolism and excretion. This is commonly referred to as ADME where: (A) Absorption is the process of a substance entering the blood circulation; (D) Distribution is the dispersion or dissemination of substances throughout the fluids and tissues of the body; (M) Metabolism (or Biotransformation) is the irreversible transformation of parent compounds into daughter metabolites; and (E) Excretion (or Elimination) refers to the elimination of the substances from the body. In rare cases, some drugs irreversibly accumulate in body tissue.

[0824] Physicochemical: As used herein, “physicochemical” means of or relating to a physical and/or chemical property.

[0825] Polypeptide per unit drug (PUD): As used herein, a PUD or product per unit drug, is defined as a subdivided portion of total daily dose, usually 1 mg, pg, kg, etc., of a product (such as a polypeptide) as measured in body fluid or tissue, usually defined in concentration such as pmol/mL, mmol/mL, etc divided by the measure in the body fluid.

[0826] Preventing: As used herein, the term “preventing” refers to partially or completely delaying onset of an infection, disease, disorder and/or condition; partially or completely delaying onset of one or more symptoms, features, or clinical manifestations of a particular infection, disease, disorder, and/or condition; partially or completely delaying onset of one or more symptoms, features, or manifestations of a particular infection, disease, disorder, and/or condition; partially or completely delaying progression from an infection, a particular disease, disorder and/or condition; and/or decreasing the risk of developing pathology associated with the infection, the disease, disorder, and/or condition.

[0827] Prodrug: The present disclosure also includes prodrugs of the compounds described herein. As used herein, “prodrugs” refer to any substance, molecule or entity which is in a form predicate for that substance, molecule or entity to act as a therapeutic upon chemical or physical alteration. Prodrugs may by covalently bonded or sequestered in some way and which release or are converted into the active drug moiety prior to, upon or after administered to a mammalian subject. Prodrugs can be prepared by modifying functional groups present in the compounds in such a way that the modifications are cleaved, either in routine manipulation or in vivo, to the parent compounds. Prodrugs include compounds wherein hydroxyl, amino, sulfhydryl, or carboxyl groups are bonded to any group that, when administered to a mammalian subject, cleaves to form a free hydroxyl, amino, sulfhydryl, or carboxyl group respectively. Preparation and use of prodrugs is discussed in T. Higuchi and V. Stella, “Pro-drugs as Novel Delivery Systems,” Vol. 14 of the A.C.S. Symposium Series, and in Bioreversible Carriers in Drug Design, ed. Edward B. Roche, American Pharmaceutical Association and Pergamon Press, 1987, both of which are hereby incorporated by reference in their entirety.

[0828] Proliferate: As used herein, the term “proliferate” means to grow, expand or increase or cause to grow, expand or increase rapidly. “Proliferative” means having the ability to proliferate. “Anti-proliferative” means having properties counter to or inapposite to proliferative properties.

[0829] Progenitor cell: As used herein, the term “progenitor cell” refers to cells that have greater developmental potential relative to a cell which it can give rise to by differentiation.

[0830] Prophylactic: As used herein, “prophylactic” refers to a therapeutic or course of action used to prevent the spread of disease.

[0831] Prophylaxis: As used herein, a “prophylaxis” refers to a measure taken to maintain health and prevent the spread of disease. An “immune phrophylaxis” refers to a measure to produce active or passive immunity to prevent the spread of disease.

[0832] Protein cleavage site: As used herein, “protein cleavage site” refers to a site where controlled cleavage of the amino acid chain can be accomplished by chemical, enzymatic or photochemical means.

[0833] Protein cleavage signal: As used herein “protein cleavage signal” refers to at least one amino acid that flags or marks a polypeptide for cleavage.

[0834] Protein of interest: As used herein, the terms “proteins of interest” or “desired proteins” include those provided herein and fragments, mutants, variants, and alterations thereof.

[0835] Proximal: As used herein, the term “proximal” means situated nearer to the center or to a point or region of interest.

[0836] Pseudouridine: As used herein, pseudouridine refers to the C-glycoside isomer of the nucleoside uridine. A “pseudouridine analog” is any modification, variant, isoform or derivative of pseudouridine. For example, pseudouridine analogs include but are not limited to 1-carboxymethyl-pseudouridine, 1-propynyl-pseudouridine, 1-taurinomethyl-pseudouridine, 1-taurinomethyl-4-thio-pseudouridine, 1-methylpseudouridine (m¹ψ), 1-methyl-4-thio-pseudouridine (m¹s⁴ψ)4-thio-1-methyl-pseudouridine, 3-methyl-pseudouridine (m³ψ), 2-thio-1-methyl-pseudouridine, 1-methyl-1-deaza-pseudouridine, 2-thio-1-methyl-1-deaza-pseudouridine, dihydropseudouridine, 2-thio-dihydropseudouridine, 2-methoxyuridine, 2-methoxy-4-thio-uridine, 4-methoxy-pseudouridine, 4-methoxy-2-thio-pseudouridine, N1-methyl-pseudouridine, 1-methyl-3-(3-amino-3-carboxypropyl)pseudouridine (acp³ψ), and 2′-O-methyl-pseudouridine (ψm).

[0837] Purified: As used herein, “purify,” “purified,” “purification” means to make substantially pure or clear from unwanted components, material defilement, admixture or imperfection.

[0838] Repeated transfection: As used herein, the term “repeated transfection” refers to transfection of the same cell culture with a polynucleotide a plurality of times. The cell culture can be transfected at least twice, at least 3 times, at least 4 times, at least 5 times, at least 6 times, at least 7 times, at least 8 times, at least 9 times, at least 10 times, at least 11 times, at least 12 times, at least 13 times, at least 14 times, at least 15 times, at least 16 times, at least 17 times at least 18 times, at least 19 times, at least 20 times, at least 25 times, at least 30 times, at least 35 times, at least 40 times, at least 45 times, at least 50 times or more.

[0839] Sample: As used herein, the term “sample” or “biological sample” refers to a subset of its tissues, cells or component parts (e.g. body fluids, including but not limited to blood, mucus, lymphatic fluid, synovial fluid, cerebrospinal fluid, saliva, amniotic fluid, amniotic cord blood, urine, vaginal fluid and semen). A sample further may include a homogenate, lysate or extract prepared from a whole organism or a subset of its tissues, cells or component parts, or a fraction or portion thereof, including but not limited to, for example, plasma, serum, spinal fluid, lymph fluid, the external sections of the skin, respiratory, intestinal, and genitourinary tracts, tears, saliva, milk, blood cells, tumors, organs. A sample further refers to a medium, such as a nutrient broth or gel, which may contain cellular components, such as proteins or nucleic acid molecule.

[0840] Signal Sequences: As used herein, the phrase “signal sequences” refers to a sequence which can direct the transport or localization of a protein.

[0841] Single unit dose: As used herein, a “single unit dose” is a dose of any therapeutic administered in one dose/at one time/single route/single point of contact, i.e., single administration event.

[0842] Similarity: As used herein, the term “similarity” refers to the overall relatedness between polymeric molecules, e.g. between polynucleotide molecules (e.g. DNA molecules and/or RNA molecules) and/or between polypeptide molecules. Calculation of percent similarity of polymeric molecules to one another can be performed in the same manner as a calculation of percent identity, except that calculation of percent similarity takes into account conservative substitutions as is understood in the art.

[0843] Split dose: As used herein, a “split dose” is the division of single unit dose or total daily dose into two or more doses.

[0844] Stable: As used herein “stable” refers to a compound that is sufficiently robust to survive isolation to a useful degree of purity from a reaction mixture, and preferably capable of formulation into an efficacious therapeutic agent.

[0845] Stabilized: As used herein, the term “stabilize”, “stabilized,” “stabilized region” means to make or become stable.

[0846] Stereoisomer: As used herein, the term “stereoisomer” refers to all possible different isomeric as well as conformational forms which a compound may possess (e.g., a compound of any formula described herein), in particular all possible stereochemically and conformationally isomeric forms, all diastereomers, enantiomers and/or conformers of the basic molecular structure. Some compounds of the present invention may exist in different tautomeric forms, all of the latter being included within the scope of the present invention.

[0847] Subject: As used herein, the term “subject” or “patient” refers to any organism to which a composition in accordance with the invention may be administered, e.g., for experimental, diagnostic, prophylactic, and/or therapeutic purposes. Typical subjects include animals (e.g., mammals such as mice, rats, rabbits, non-human primates, and humans) and/or plants.

[0848] Substantially: As used herein, the term “substantially” refers to the qualitative condition of exhibiting total or near-total extent or degree of a characteristic or property of interest. One of ordinary skill in the biological arts will understand that biological and chemical phenomena rarely, if ever, go to completion and/or proceed to completeness or achieve or avoid an absolute result. The term “substantially” is therefore used herein to capture the potential lack of completeness inherent in many biological and chemical phenomena.

[0849] Substantially equal: As used herein as it relates to time differences between doses, the term means plus/minus 2%.

[0850] Substantially simultaneously: As used herein and as it relates to plurality of doses, the term means within 2 seconds.

[0851] Suffering from: An individual who is “suffering from” a disease, disorder, and/or condition has been diagnosed with or displays one or more symptoms of a disease, disorder, and/or condition.

[0852] Susceptible to: An individual who is “susceptible to” a disease, disorder, and/or condition has not been diagnosed with and/or may not exhibit symptoms of the disease, disorder, and/or condition but harbors a propensity to develop a disease or its symptoms. In some embodiments, an individual who is susceptible to a disease, disorder, and/or condition (for example, cancer) may be characterized by one or more of the following: (1) a genetic mutation associated with development of the disease, disorder, and/or condition; (2) a genetic polymorphism associated with development of the disease, disorder, and/or condition; (3) increased and/or decreased expression and/or activity of a protein and/or nucleic acid associated with the disease, disorder, and/or condition; (4) habits and/or lifestyles associated with development of the disease, disorder, and/or condition; (5) a family history of the disease, disorder, and/or condition; and (6) exposure to and/or infection with a microbe associated with development of the disease, disorder, and/or condition. In some embodiments, an individual who is susceptible to a disease, disorder, and/or condition will develop the disease, disorder, and/or condition. In some embodiments, an individual who is susceptible to a disease, disorder, and/or condition will not develop the disease, disorder, and/or condition.

[0853] Sustained release: As used herein, the term “sustained release” refers to a pharmaceutical composition or compound release profile that conforms to a release rate over a specific period of time.

[0854] Synthetic: The term “synthetic” means produced, prepared, and/or manufactured by the hand of man. Synthesis of polynucleotides or polypeptides or other molecules of the present invention may be chemical or enzymatic.

[0855] Targeted Cells: As used herein, “targeted cells” refers to any one or more cells of interest. The cells may be found in vitro, in vivo, in situ or in the tissue or organ of an organism. The organism may be an animal, preferably a mammal, more preferably a human and most preferably a patient.

[0856] Therapeutic Agent: The term “therapeutic agent” refers to any agent that, when administered to a subject, has a therapeutic, diagnostic, and/or prophylactic effect and/or elicits a desired biological and/or pharmacological effect.

[0857] Therapeutically effective amount: As used herein, the term “therapeutically effective amount” means an amount of an agent to be delivered (e.g., nucleic acid, drug, therapeutic agent, diagnostic agent, prophylactic agent, etc.) that is sufficient, when administered to a subject suffering from or susceptible to an infection, disease, disorder, and/or condition, to treat, improve symptoms of, diagnose, prevent, and/or delay the onset of the infection, disease, disorder, and/or condition.

[0858] Therapeutically effective outcome: As used herein, the term “therapeutically effective outcome” means an outcome that is sufficient in a subject suffering from or susceptible to an infection, disease, disorder, and/or condition, to treat, improve symptoms of, diagnose, prevent, and/or delay the onset of the infection, disease, disorder, and/or condition.

[0859] Total daily dose: As used herein, a “total daily dose” is an amount given or prescribed in 24 hr period. It may be administered as a single unit dose.

[0860] Totipotency: As used herein, “totipotency” refers to a cell with a developmental potential to make all of the cells found in the adult body as well as the extra-embryonic tissues, including the placenta.

[0861] Transcription factor: As used herein, the term “transcription factor” refers to a DNA-binding protein that regulates transcription of DNA into RNA, for example, by activation or repression of transcription. Some transcription factors effect regulation of transcription alone, while others act in concert with other proteins. Some transcription factor can both activate and repress transcription under certain conditions. In general, transcription factors bind a specific target sequence or sequences highly similar to a specific consensus sequence in a regulatory region of a target gene. Transcription factors may regulate transcription of a target gene alone or in a complex with other molecules.

[0862] Transcription: As used herein, the term “transcription” refers to methods to introduce exogenous nucleic acids into a cell. Methods of transfection include, but are not limited to, chemical methods, physical treatments and cationic lipids or mixtures.

[0863] Transdifferentiation: As used herein, “transdifferentiation” refers to the capacity of differentiated cells of one type to lose identifying characteristics and to change their phenotype to that of other fully differentiated cells.

[0864] Treating: As used herein, the term “treating” refers to partially or completely alleviating, ameliorating, improving, relieving, delaying onset of, inhibiting progression of, reducing severity of, and/or reducing incidence of one or more symptoms or features of a particular infection, disease, disorder, and/or condition. For example, “treating” cancer may refer to inhibiting survival, growth, and/or spread of a tumor. Treatment may be administered to a subject who does not exhibit signs of a disease, disorder, and/or condition and/or to a subject who exhibits only early signs of a disease, disorder, and/or condition for the purpose of decreasing the risk of developing pathology associated with the disease, disorder, and/or condition.

[0865] Unmodified: As used herein, “unmodified” refers to any substance, compound or molecule prior to being changed in any way. Unmodified may, but does not always, refer to the wild type or native form of a biomolecule. Molecules may undergo a series of modifications whereby each modified molecule may serve as the “unmodified” starting molecule for a subsequent modification.

[0866] Unipotent: As used herein, “unipotent” when referring to a cell means to give rise to a single cell lineage.

[0867] Vaccine: As used herein, the phrase “vaccine” refers to a biological preparation that improves immunity to a particular disease.

[0868] Viral protein: As used herein, the pharse “viral protein” means any protein originating from a virus.

### EQUIVALENTS AND SCOPE

[0869] Those skilled in the art will recognize, or be able to ascertain using no more than routine experimentation, many equivalents to the specific embodiments in accordance with the invention described herein. The scope of the present invention is not intended to be limited to the above Description, but rather is as set forth in the appended claims.

[0870] In the claims, articles such as “a,” “an,” and “the” may mean one or more than one unless indicated to the contrary or otherwise evident from the context. Claims or descriptions that include “or” between one or more members of a group are considered satisfied if one, more than one, or all of the group members are present in, employed in, or otherwise relevant to a given product or process unless indicated to the contrary or otherwise evident from the context. The invention includes embodiments in which exactly one member of the group is present in, employed in, or otherwise relevant to a given product or process. The invention includes embodiments in which more than one, or all of the group members are present in, employed in, or otherwise relevant to a given product or process.

[0871] It is also noted that the term “comprising” is intended to be open and permits but does not require the inclusion of additional elements or steps. When the term “comprising” is used herein, the term “consisting of” is thus also encompassed and disclosed.

[0872] Where ranges are given, endpoints are included. Furthermore, it is to be understood that unless otherwise indicated or otherwise evident from the context and understanding of one of ordinary skill in the art, values that are expressed as ranges can assume any specific value or subrange within the stated ranges in different embodiments of the invention, to the tenth of the unit of the lower limit of the range, unless the context clearly dictates otherwise.

[0873] In addition, it is to be understood that any particular embodiment of the present invention that falls within the prior art may be explicitly excluded from any one or more of the claims. Since such embodiments are deemed to be known to one of ordinary skill in the art, they may be excluded even if the exclusion is not set forth explicitly herein. Any particular embodiment of the compositions of the invention (e.g., any nucleic acid or protein encoded thereby; any method of production; any method of use; etc.) can be excluded from any one or more claims, for any reason, whether or not related to the existence of prior art.

[0874] All cited sources, for example, references, publications, databases, database entries, and art cited herein, are incorporated into this application by reference, even if not expressly stated in the citation. In case of conflicting statements of a cited source and the instant application, the statement in the instant application shall control.

[0875] Section and table headings are not intended to be limiting.

### EXAMPLES

### Example 1

### Manufacture of Polynucleotides

[0876] According to the present invention, the manufacture of polynucleotides and or parts or regions thereof may be accomplished utilizing the methods taught in U.S. Ser. No. 61/800,049 filed Mar. 15, 2013 entitled “Manufacturing Methods for Production of RNA Transcripts” (Attorney Docket number M500), the contents of which is incorporated herein by reference in its entirety.

[0877] Purification methods may include those taught in U.S. Ser. No. 61/799,872 filed Mar. 15, 2013 entitled “Methods of removing DNA fragments in mRNA production” (Attorney Docket number M501); U.S. Ser. No. 61/794,842 filed Mar. 15, 2013, entitled “Ribonucleic acid purification” (Attorney Docket number M502); each of which is incorporated herein by reference in its entirety.

[0878] Detection and characterization methods of the polynucleotides may be performed as taught in U.S. Ser. No. 61/798,945 filed Mar. 15, 2013 entitled “Characterization of mRNA Molecules (Attorney Docket number M505), of the contents of which is incorporated herein by reference in its entirety.

[0879] Characterization of the polynucleotides of the invention may be accomplished using a procedure selected from the group consisting of polynucleotide mapping, reverse transcriptase sequencing, charge distribution analysis, and detection of RNA impurities, wherein characterizing comprises determining the RNA transcript sequence, determining the purity of the RNA transcript, or determining the charge heterogeneity of the RNA transcript. Such methods are taught in, for example, U.S. Ser. No. 61/799,905 filed Mar. 15, 2013 entitled “Analysis of mRNA Heterogeneity and Stability” (Attorney Docket number M506) and U.S. Ser. No. 61/800,110 filed Mar. 15, 2013 entitled “Ion Exchange Purification of mRNA” (Attorney Docket number M507) the contents of each of which is incorporated herein by reference in its entirety.

### Example 2

### Chimeric Polynucleotide Synthesis: Triphosphate Route

### Introduction

[0880] According to the present invention, two regions or parts of a chimeric polynucleotide may be joined or ligated using triphosphate chemistry.

[0881] According to this method, a first region or part of 100 nucleotides or less is chemically synthesized with a 5′ monophosphate and terminal 3′ desOH or blocked OH. If the region is longer than 80 nucleotides, it may be synthesized as two strands for ligation.

[0882] If the first region or part is synthesized as a non-positionally modified region or part using in vitro transcription (IVT), conversion the 5′monophosphate with subsequent capping of the 3′ terminus may follow.

[0883] Monophosphate protecting groups may be selected from any of those known in the art.

[0884] The second region or part of the chimeric polynucleotide may be synthesized using either chemical synthesis or IVT methods. IVT methods may include an RNA polymerase that can utilize a primer with a modified cap. Alternatively, a cap of up to 80 nucleotides may be chemically synthesized and coupled to the IVT region or part.

[0885] It is noted that for ligation methods, ligation with DNA T4 ligase, followed by treatment with DNAse should readily avoid concatenation.

[0886] The entire chimeric polynucleotide need not be manufactured with a phosphate-sugar backbone. If one of the regions or parts encodes a polypeptide, then it is preferable that such region or part comprise a phosphate-sugar backbone.

[0887] Ligation is then performed using any known click chemistry, orthoclick chemistry, solulink, or other bioconjugate chemistries known to those in the art.

### Synthetic Route

[0888] The chimeric polynucleotide is made using a series of starting segments. Such segments include:

[0889] (a) Capped and protected 5′ segment comprising a normal 3′OH (SEG. 1)

[0890] (b) 5′ triphosphate segment which may include the coding region of a polypeptide and comprising a normal 3′OH (SEG. 2)

[0891] (c) 5′ monophosphate segment for the 3′ end of the chimeric polynucleotide (e.g., the tail) comprising cordycepin or no 3′OH (SEG. 3)

[0892] After synthesis (chemical or IVT), segment 3 (SEG. 3) is treated with cordycepin and then with pyrophosphatase to create the 5′monophosphate.

[0893] Segment 2 (SEG. 2) is then ligated to SEG. 3 using RNA ligase. The ligated polynucleotide is then purified and treated with pyrophosphatase to cleave the diphosphate. The treated SEG.2-SEG. 3 construct is then purified and SEG. 1 is ligated to the 5′ terminus. A further purification step of the chimeric polynucleotide may be performed.

[0894] Where the chimeric polynucleotide encodes a polypeptide, the ligated or joined segments may be represented as: 5′UTR (SEG. 1), open reading frame or ORF (SEG. 2) and 3′UTR+PolyA (SEG. 3).

[0895] The yields of each step may be as much as 90-95%.

### Example 3

### PCR for cDNA Production

[0896] PCR procedures for the preparation of cDNA are performed using 2×KAPA HIFI™ HotStart ReadyMix by Kapa Biosystems (Woburn, Mass.). This system includes 2×KAPA ReadyMix12.5 μl; Forward Primer (10 uM) 0.75 μl; Reverse Primer (10 uM) 0.75 μl; Template cDNA −100 ng; and dH₂O diluted to 25.0 μl. The reaction conditions are at 95° C. for 5 min. and 25 cycles of 98° C. for 20 sec, then 58° C. for 15 sec, then 72° C. for 45 sec, then 72° C. for 5 min. then 4° C. to termination.

[0897] The reverse primer of the instant invention incorporates a poly-T₁₂₀ for a poly-A₁₂₀ in the mRNA. Other reverse primers with longer or shorter poly(T) tracts can be used to adjust the length of the poly(A) tail in the polynucleotide mRNA.

[0898] The reaction is cleaned up using Invitrogen's PURELINK™ PCR Micro Kit (Carlsbad, Calif.) per manufacturer's instructions (up to 5 μg). Larger reactions will require a cleanup using a product with a larger capacity. Following the cleanup, the cDNA is quantified using the NANODROP™ and analyzed by agarose gel electrophoresis to confirm the cDNA is the expected size. The cDNA is then submitted for sequencing analysis before proceeding to the in vitro transcription reaction.

### Example 4

### In Vitro Transcription (IVT)

[0899] The in vitro transcription reaction generates polynucleotides containing uniformly modified polynucleotides. Such uniformly modified polynucleotides may comprise a region or part of the polynucleotides of the invention. The input nucleotide triphosphate (NTP) mix is made in-house using natural and un-natural NTPs.

[0900] A typical in vitro transcription reaction includes the following:

| | | | |
|---|---|---|---|
| 1 | Template cDNA | 1.0 | μg |
| 2 | 10x transcription buffer (400 mM Tris-HCl | 2.0 | μl |
| | pH 8.0, 190 mM MgCl₂, 50 mM DTT, 10 mM | | |
| | Spermidine) | | |
| 3 | Custom NTPs (25 mM each) | 7.2 | μl |
| 4 | RNase Inhibitor | 20 | U |
| 5 | T7 RNA polymerase | 3000 | U |
| 6 | dH₂0 | Up to 20.0 | μl. and |
| 7 | Incubation at 37° C. for 3 hr-5 hrs. | | |

[0901] The crude IVT mix may be stored at 4° C. overnight for cleanup the next day. 1 U of RNase-free DNase is then used to digest the original template. After 15 minutes of incubation at 37° C., the mRNA is purified using Ambion's MEGACLEAR™ Kit (Austin, Tex.) following the manufacturer's instructions. This kit can purify up to 500 μg of RNA. Following the cleanup, the RNA is quantified using the NanoDrop and analyzed by agarose gel electrophoresis to confirm the RNA is the proper size and that no degradation of the RNA has occurred.

### 5. Enzymatic Capping

[0902] Capping of a polynucleotide is performed as follows where the mixture includes: IVT RNA 60 μg-180 μg and dH₂O up to 72 μl. The mixture is incubated at 65° C. for 5 minutes to denature RNA, and then is transferred immediately to ice.

[0903] The protocol then involves the mixing of 10× Capping Buffer (0.5 M Tris-HCl (pH 8.0), 60 mM KCl, 12.5 mM MgCl2) (10.0 μl); 20 mM GTP (5.0 μl); 20 mM S-Adenosyl Methionine (2.5 μl); RNase Inhibitor (100 U); 2′-O-Methyltransferase (400U); Vaccinia capping enzyme (Guanylyl transferase) (40 U); dH₂O (Up to 28 μl); and incubation at 37° C. for 30 minutes for 60 μg RNA or up to 2 hours for 180 μg of RNA.

[0904] The polynucleotide is then purified using Ambion's MEGACLEAR™ Kit (Austin, Tex.) following the manufacturer's instructions. Following the cleanup, the RNA is quantified using the NANODROP™ (ThermoFisher, Waltham, Mass.) and analyzed by agarose gel electrophoresis to confirm the RNA is the proper size and that no degradation of the RNA has occurred. The RNA product may also be sequenced by running a reverse-transcription-PCR to generate the cDNA for sequencing.

### Example 6

### PolyA Tailing Reaction

[0905] Without a poly-T in the cDNA, a poly-A tailing reaction must be performed before cleaning the final product. This is done by mixing Capped IVT RNA (100 μl); RNase Inhibitor (20 U); 10× Tailing Buffer (0.5 M Tris-HCl (pH 8.0), 2.5 M NaCl, 100 mM MgCl2)(12.0 μl); 20 mM ATP (6.0 μl); Poly-A Polymerase (20 U); dH₂O up to 123.5 μl and incubation at 37° C. for 30 min. If the poly-A tail is already in the transcript, then the tailing reaction may be skipped and proceed directly to cleanup with Ambion's MEGACLEAR™ kit (Austin, Tex.) (up to 500 μg). Poly-A Polymerase is preferably a recombinant enzyme expressed in yeast.

[0906] It should be understood that the processivity or integrity of the polyA tailing reaction may not always result in an exact size polyA tail. Hence polyA tails of approximately between 40-200 nucleotides, e.g, about 40, 50, 60, 70, 80, 90, 91, 92, 93, 94, 95, 96, 97, 98, 99, 100, 101, 102, 103, 104, 105, 106, 107, 108, 109, 110, 150-165, 155, 156, 157, 158, 159, 160, 161, 162, 163, 164 or 165 are within the scope of the invention.

### Example 7

### Natural 5′ Caps and 5′ Cap Analogues

[0907] 5′-capping of polynucleotides may be completed concomitantly during the in vitro-transcription reaction using the following chemical RNA cap analogs to generate the 5′-guanosine cap structure according to manufacturer protocols: 3′-O-Me-m7G(5)ppp(5′) G [the ARCA cap]; G(5)ppp(5′)A; G(5′)ppp(5′)G; m7G(5′)ppp(5′)A; m7G(5′)ppp(5′)G (New England BioLabs, Ipswich, Mass.). 5′-capping of modified RNA may be completed post-transcriptionally using a Vaccinia Virus Capping Enzyme to generate the “Cap 0” structure: m7G(5′)ppp(5′)G (New England BioLabs, Ipswich, Mass.). Cap 1 structure may be generated using both Vaccinia Virus Capping Enzyme and a 2′-O methyl-transferase to generate: m7G(5′)ppp(5′)G-2′-O-methyl. Cap 2 structure may be generated from the Cap 1 structure followed by the 2′-O-methylation of the 5′-antepenultimate nucleotide using a 2′-O methyl-transferase. Cap 3 structure may be generated from the Cap 2 structure followed by the 2′-O-methylation of the 5′-preantepenultimate nucleotide using a 2′-O methyl-transferase. Enzymes are preferably derived from a recombinant source.

[0908] When transfected into mammalian cells, the modified mRNAs have a stability of between 12-18 hours or more than 18 hours, e.g., 24, 36, 48, 60, 72 or greater than 72 hours.

### Example 8

### Capping Assays

[0909] A. Protein Expression Assay

[0910] Polynucleotides encoding a polypeptide, containing any of the caps taught herein can be transfected into cells at equal concentrations. 6, 12, 24 and 36 hours post-transfection the amount of protein secreted into the culture medium can be assayed by ELISA. Synthetic polynucleotides that secrete higher levels of protein into the medium would correspond to a synthetic polynucleotide with a higher translationally-competent Cap structure.

[0911] B. Purity Analysis Synthesis

[0912] Polynucleotides encoding a polypeptide, containing any of the caps taught herein can be compared for purity using denaturing Agarose-Urea gel electrophoresis or HPLC analysis. Polynucleotides with a single, consolidated band by electrophoresis correspond to the higher purity product compared to polynucleotides with multiple bands or streaking bands. Synthetic polynucleotides with a single HPLC peak would also correspond to a higher purity product. The capping reaction with a higher efficiency would provide a more pure polynucleotide population.

[0913] C. Cytokine Analysis

[0914] Polynucleotides encoding a polypeptide, containing any of the caps taught herein can be transfected into cells at multiple concentrations. 6, 12, 24 and 36 hours post-transfection the amount of pro-inflammatory cytokines such as TNF-alpha and IFN-beta secreted into the culture medium can be assayed by ELISA. Polynucleotides resulting in the secretion of higher levels of pro-inflammatory cytokines into the medium would correspond to polynucleotides containing an immune-activating cap structure.

[0915] D. Capping Reaction Efficiency

[0916] Polynucleotides encoding a polypeptide, containing any of the caps taught herein can be analyzed for capping reaction efficiency by LC-MS after nuclease treatment. Nuclease treatment of capped polynucleotides would yield a mixture of free nucleotides and the capped 5′-5-triphosphate cap structure detectable by LC-MS. The amount of capped product on the LC-MS spectra can be expressed as a percent of total polynucleotide from the reaction and would correspond to capping reaction efficiency. The cap structure with higher capping reaction efficiency would have a higher amount of capped product by LC-MS.

### Example 9

### Agarose Gel Electrophoresis of Modified RNA or RT PCR Products

[0917] Individual polynucleotides (200-400 ng in a 20 μl volume) or reverse transcribed PCR products (200-400 ng) are loaded into a well on a non-denaturing 1.2% Agarose E-Gel (Invitrogen, Carlsbad, Calif.) and run for 12-15 minutes according to the manufacturer protocol.

### Example 10

### Nanodrop Modified RNA Quantification and UV Spectral Data

[0918] Modified polynucleotides in TE buffer (1 μl) are used for Nanodrop UV absorbance readings to quantitate the yield of each polynucleotide from an chemical synthesis or in vitro transcription reaction.

### Example 11

### Formulation of Modified mRNA Using Lipidoids

[0919] Polynucleotides are formulated for in vitro experiments by mixing the polynucleotides with the lipidoid at a set ratio prior to addition to cells. In vivo formulation may require the addition of extra ingredients to facilitate circulation throughout the body. To test the ability of these lipidoids to form particles suitable for in vivo work, a standard formulation process used for siRNA-lipidoid formulations may used as a starting point. After formation of the particle, polynucleotide is added and allowed to integrate with the complex. The encapsulation efficiency is determined using a standard dye exclusion assays.

### Example 12

### Method of Screening for Protein Expression

[0920] A. Electrospray Ionization

[0921] A biological sample which may contain proteins encoded by a polynucleotide administered to the subject is prepared and analyzed according to the manufacturer protocol for electrospray ionization (ESI) using 1, 2, 3 or 4 mass analyzers. A biologic sample may also be analyzed using a tandem ESI mass spectrometry system.

[0922] Patterns of protein fragments, or whole proteins, are compared to known controls for a given protein and identity is determined by comparison.

[0923] B. Matrix-Assisted Laser Desorption/Ionization

[0924] A biological sample which may contain proteins encoded by one or more polynucleotides administered to the subject is prepared and analyzed according to the manufacturer protocol for matrix-assisted laser desorption/ionization (MALDI).

[0925] Patterns of protein fragments, or whole proteins, are compared to known controls for a given protein and identity is determined by comparison.

[0926] C. Liquid Chromatography-Mass Spectrometry-Mass Spectrometry

[0927] A biological sample, which may contain proteins encoded by one or more polynucleotides, may be treated with a trypsin enzyme to digest the proteins contained within. The resulting peptides are analyzed by liquid chromatography-mass spectrometry-mass spectrometry (LC/MS/MS). The peptides are fragmented in the mass spectrometer to yield diagnostic patterns that can be matched to protein sequence databases via computer algorithms. The digested sample may be diluted to achieve 1 ng or less starting material for a given protein. Biological samples containing a simple buffer background (e.g. water or volatile salts) are amenable to direct in-solution digest; more complex backgrounds (e.g. detergent, non-volatile salts, glycerol) require an additional clean-up step to facilitate the sample analysis.

[0928] Patterns of protein fragments, or whole proteins, are compared to known controls for a given protein and identity is determined by comparison.

### Example 13

### Cyclization and/or Concatemerization

[0929] According to the present invention, a polynucleotide may be cyclized, or concatemerized, to generate a translation competent molecule to assist interactions between poly-A binding proteins and 5′-end binding proteins. The mechanism of cyclization or concatemerization may occur through at least 3 different routes: 1) chemical, 2) enzymatic, and 3) ribozyme catalyzed. The newly formed 5′-/3′-linkage may be intramolecular or intermolecular.

[0930] In the first route, the 5′-end and the 3′-end of the nucleic acid contain chemically reactive groups that, when close together, form a new covalent linkage between the 5′-end and the 3′-end of the molecule. The 5′-end may contain an NETS-ester reactive group and the 3′-end may contain a 3′-amino-terminated nucleotide such that in an organic solvent the 3′-amino-terminated nucleotide on the 3′-end of a synthetic mRNA molecule will undergo a nucleophilic attack on the 5′-NHS-ester moiety forming a new 5′-/3′-amide bond.

[0931] In the second route, T4 RNA ligase may be used to enzymatically link a 5′-phosphorylated nucleic acid molecule to the 3′-hydroxyl group of a nucleic acid forming a new phosphorodiester linkage. In an example reaction, 1 μg of a nucleic acid molecule is incubated at 37° C. for 1 hour with 1-10 units of T4 RNA ligase (New England Biolabs, Ipswich, Mass.) according to the manufacturer's protocol. The ligation reaction may occur in the presence of a split polynucleotide capable of base-pairing with both the 5′- and 3′-region in juxtaposition to assist the enzymatic ligation reaction.

[0932] In the third route, either the 5′- or 3′-end of the cDNA template encodes a ligase ribozyme sequence such that during in vitro transcription, the resultant nucleic acid molecule can contain an active ribozyme sequence capable of ligating the 5′-end of a nucleic acid molecule to the 3′-end of a nucleic acid molecule. The ligase ribozyme may be derived from the Group I Intron, Group I Intron, Hepatitis Delta Virus, Hairpin ribozyme or may be selected by SELEX (systematic evolution of ligands by exponential enrichment). The ribozyme ligase reaction may take 1 to 24 hours at temperatures between 0 and 37° C.

[0933] It is to be understood that the words which have been used are words of description rather than limitation, and that changes may be made within the purview of the appended claims without departing from the true scope and spirit of the invention in its broader aspects.

[0934] While the present invention has been described at some length and with some particularity with respect to the several described embodiments, it is not intended that it should be limited to any such particulars or embodiments or any particular embodiment, but it is to be construed with references to the appended claims so as to provide the broadest possible interpretation of such claims in view of the prior art and, therefore, to effectively encompass the intended scope of the invention.

[0935] All publications, patent applications, patents, and other references mentioned herein are incorporated by reference in their entirety. In case of conflict, the present specification, including definitions, will control. In addition, section headings, the materials, methods, and examples are illustrative only and not intended to be limiting.

The application's sequence listing, which the Patent Office published only in electronic form, follows.

SEQUENCE LISTING (598 sequences)

SEQ ID NO: 1 - protein, 22 aa, Unknown
  Description of Unknown: 2A peptide sequence
GSGATNFSLLKQAGDVEENPGP

SEQ ID NO: 2 - DNA, 66 bp, Unknown
  Description of Unknown: Nucleic acid sequence of the 2A peptide
ggaagcggagctactaacttcagcctgctgaagcaggctggagacgtggaggagaaccctggacct

SEQ ID NO: 3 - DNA, 47 bp, Artificial Sequence
  Description of Artificial Sequence: Untranslated Region
gggaaataagagagaaaagaagagtaagaagaaatataagagccacc

SEQ ID NO: 4 - DNA, 47 bp, Artificial Sequence
  Description of Artificial Sequence: Untranslated Region
gggagatcagagagaaaagaagagtaagaagaaatataagagccacc

SEQ ID NO: 5 - DNA, 145 bp, Artificial Sequence
  Description of Artificial Sequence: Untranslated Region
ggaataaaagtctcaacacaacatatacaaaacaaacgaatctcaagcaatcaagcattctacttctattgcagcaatttaaatcatttcttttaaagcaaaagcaattttctgaaaattttcaccatttacgaacgatagcaac

SEQ ID NO: 6 - RNA, 42 nt, Artificial Sequence
  Description of Artificial Sequence: Untranslated Region
gggagacaagcuuggcauuccgguacuguugguaaagccacc

SEQ ID NO: 7 - DNA, 47 bp, Artificial Sequence; identical to SEQ ID NO: 4
  Description of Artificial Sequence: Untranslated Region

SEQ ID NO: 8 - DNA, 145 bp, Artificial Sequence; identical to SEQ ID NO: 5
  Description of Artificial Sequence: Untranslated Region

SEQ ID NO: 9 - RNA, 42 nt, Artificial Sequence; identical to SEQ ID NO: 6
  Description of Artificial Sequence: Untranslated Region

SEQ ID NO: 10 - DNA, 47 bp, Artificial Sequence
  Description of Artificial Sequence: Untranslated Region
gggaattaacagagaaaagaagagtaagaagaaatataagagccacc

SEQ ID NO: 11 - DNA, 47 bp, Artificial Sequence
  Description of Artificial Sequence: Untranslated Region
gggaaattagacagaaaagaagagtaagaagaaatataagagccacc

SEQ ID NO: 12 - DNA, 47 bp, Artificial Sequence
  Description of Artificial Sequence: Untranslated Region
gggaaataagagagtaaagaacagtaagaagaaatataagagccacc

SEQ ID NO: 13 - DNA, 47 bp, Artificial Sequence
  Description of Artificial Sequence: Untranslated Region
gggaaaaaagagagaaaagaagactaagaagaaatataagagccacc

SEQ ID NO: 14 - DNA, 47 bp, Artificial Sequence
  Description of Artificial Sequence: Untranslated Region
gggaaataagagagaaaagaagagtaagaagatatataagagccacc

SEQ ID NO: 15 - DNA, 47 bp, Artificial Sequence
  Description of Artificial Sequence: Untranslated Region
gggaaataagagacaaaacaagagtaagaagaaatataagagccacc

SEQ ID NO: 16 - DNA, 47 bp, Artificial Sequence
  Description of Artificial Sequence: Untranslated Region
gggaaattagagagtaaagaacagtaagtagaattaaaagagccacc

SEQ ID NO: 17 - DNA, 47 bp, Artificial Sequence
  Description of Artificial Sequence: Untranslated Region
gggaaataagagagaatagaagagtaagaagaaatataagagccacc

SEQ ID NO: 18 - DNA, 47 bp, Artificial Sequence
  Description of Artificial Sequence: Untranslated Region
gggaaataagagagaaaagaagagtaagaagaaaattaagagccacc

SEQ ID NO: 19 - DNA, 47 bp, Artificial Sequence
  Description of Artificial Sequence: Untranslated Region
gggaaataagagagaaaagaagagtaagaagaaatttaagagccacc

SEQ ID NO: 20 - DNA, 371 bp, Unknown
  Description of Unknown: Untranslated Region Sequence
gcgcctgcccacctgccaccgactgctggaacccagccagtgggagggcctggcccaccagagtcctgctccctcactcctcgccccgccccctgtcccagagtcccacctgggggctctctccacccttctcagagttccagtttcaaccagagttccaaccaatgggctccatcctctggattctggccaatgaaatatctccctggcagggtcctcttcttttcccagagctccaccccaaccaggagctctagttaatggagagctcccagcacactcggagcttgtgctttgtctccacgcaaagcgataaataaaagcattggtggcctttggtctttgaataaagcctgagtaggaagtctaga

SEQ ID NO: 21 - DNA, 568 bp, Unknown
  Description of Unknown: Untranslated Region Sequence
gcccctgccgctcccacccccacccatctgggccccgggttcaagagagagcggggtctgatctcgtgtagccatatagagtttgcttctgagtgtctgctttgtttagtagaggtgggcaggaggagctgaggggctggggctggggtgttgaagttggctttgcatgcccagcgatgcgcctccctgtgggatgtcatcaccctgggaaccgggagtggcccttggctcactgtgttctgcatggtttggatctgaattaattgtcctttcttctaaatcccaaccgaacttcttccaacctccaaactggctgtaaccccaaatccaagccattaactacacctgacagtagcaattgtctgattaatcactggccccttgaagacagcagaatgtccctttgcaatgaggaggagatctgggctgggcgggccagctggggaagcatttgactatctggaacttgtgtgtgcctcctcaggtatggcagtgactcacctggttttaataaaacaacctgcaacatctcatggtctttgaataaagcctgagtaggaagtctaga

SEQ ID NO: 22 - DNA, 289 bp, Unknown
  Description of Unknown: Untranslated Region Sequence
acacactccacctccagcacgcgacttctcaggacgacgaatcttctcaatgggggggcggctgagctccagccaccccgcagtcactttctttgtaacaacttccgttgctgccatcgtaaactgacacagtgtttataacgtgtacatacattaacttattacctcattttgttatttttcgaaacaaagccctgtggaagaaaatggaaaacttgaagaagcattaaagtcattctgttaagctgcgtaaatggtctttgaataaagcctgagtaggaagtctaga

SEQ ID NO: 23 - DNA, 379 bp, Unknown
  Description of Unknown: Untranslated Region Sequence
catcacatttaaaagcatctcagcctaccatgagaataagagaaagaaaatgaagatcaaaagcttattcatctgtttttctttttcgttggtgtaaagccaacaccctgtctaaaaaacataaatttctttaatcattttgcctcttttctctgtgcttcaattaataaaaaatggaaagaatctaatagagtggtacagcactgttatttttcaaagatgtgttgctatcctgaaaattctgtaggttctgtggaagttccagtgttctctcttattccacttcggtagaggatttctagtttcttgtgggctaattaaataaatcattaatactcttctaatggtctttgaataaagcctgagtaggaagtctaga

SEQ ID NO: 24 - DNA, 118 bp, Unknown
  Description of Unknown: Untranslated Region Sequence
gctgccttctgcggggcttgccttctggccatgcccttcttctctcccttgcacctgtacctcttggtctttgaataaagcctgagtaggaaggcggccgctcgagcatgcatctaga

SEQ ID NO: 25 - DNA, 908 bp, Unknown
  Description of Unknown: Untranslated Region Sequence
gccaagccctccccatcccatgtatttatctctatttaatatttatgtctatttaagcctcatatttaaagacagggaagagcagaacggagccccaggcctctgtgtccttccctgcatttctgagtttcattctcctgcctgtagcagtgagaaaaagctcctgtcctcccatcccctggactgggaggtagataggtaaataccaagtatttattactatgactgctccccagccctggctctgcaatgggcactgggatgagccgctgtgagcccctggtcctgagggtccccacctgggacccttgagagtatcaggtctcccacgtgggagacaagaaatccctgtttaatatttaaacagcagtgttccccatctgggtccttgcacccctcactctggcctcagccgactgcacagcggcccctgcatccccttggctgtgaggcccctggacaagcagaggtggccagagctgggaggcatggccctggggtcccacgaatttgctggggaatctcgtttttcttcttaagacttttgggacatggtttgactcccgaacatcaccgacgcgtctcctgtttttctgggtggcctcgggacacctgccctgcccccacgagggtcaggactgtgactctttttagggccaggcaggtgcctggacatttgccttgctggacggggactggggatgtgggagggagcagacaggaggaatcatgtcaggcctgtgtgtgaaaggaagctccactgtcaccctccacctcttcaccccccactcaccagtgtcccctccactgtcacattgtaactgaacttcaggataataaagtgtttgcctccatggtctttgaataaagcctgagtaggaaggcggccgctcgagcatgcatctaga

SEQ ID NO: 26 - DNA, 835 bp, Unknown
  Description of Unknown: Untranslated Region Sequence
actcaatctaaattaaaaaagaaagaaatttgaaaaaactttctctttgccatttcttcttcttcttttttaactgaaagctgaatccttccatttcttctgcacatctacttgcttaaattgtgggcaaaagagaaaaagaaggattgatcagagcattgtgcaatacagtttcattaactccttcccccgctcccccaaaaatttgaatttttttttcaacactcttacacctgttatggaaaatgtcaacctttgtaagaaaaccaaaataaaaattgaaaaataaaaaccataaacatttgcaccacttgtggcttttgaatatcttccacagagggaagtttaaaacccaaacttccaaaggtttaaactacctcaaaacactttcccatgagtgtgatccacattgttaggtgctgacctagacagagatgaactgaggtccttgttttgttttgttcataatacaaaggtgctaattaatagtatttcagatacttgaagaatgttgatggtgctagaagaatttgagaagaaatactcctgtattgagttgtatcgtgtggtgtattttttaaaaaatttgatttagcattcatattttccatcttattcccaattaaaagtatgcagattatttgcccaaatcttcttcagattcagcatttgttctttgccagtctcattttcatcttcttccatggttccacagaagctttgtttcttgggcaagcagaaaaattaaattgtacctattttgtatatgtgagatgtttaaataaattgtgaaaaaaatgaaataaagcatgtttggttttccaaaagaacatat

SEQ ID NO: 27 - DNA, 297 bp, Unknown
  Description of Unknown: Untranslated Region Sequence
cgccgccgcccgggccccgcagtcgagggtcgtgagcccaccccgtccatggtgctaagcgggcccgggtcccacacggccagcaccgctgctcactcggacgacgccctgggcctgcacctctccagctcctcccacggggtccccgtagccccggcccccgcccagccccaggtctccccaggccctccgcaggctgcccggcctccctccccctgcagccatcccaaggctcctgacctacctggcccctgagctctggagcaagccctgacccaataaaggctttgaacccat

SEQ ID NO: 28 - DNA, 602 bp, Unknown
  Description of Unknown: Untranslated Region Sequence
ggggctagagccctctccgcacagcgtggagacggggcaaggaggggggttattaggattggtggttttgttttgctttgtttaaagccgtgggaaaatggcacaactttacctctgtgggagatgcaacactgagagccaaggggtgggagttgggataatttttatataaaagaagtttttccactttgaattgctaaaagtggcatttttcctatgtgcagtcactcctctcatttctaaaatagggacgtggccaggcacggtggctcatgcctgtaatcccagcactttgggaggccgaggcaggcggctcacgaggtcaggagatcgagactatcctggctaacacggtaaaaccctgtctctactaaaagtacaaaaaattagctgggcgtggtggtgggcacctgtagtcccagctactcgggaggctgaggcaggagaaaggcatgaatccaagaggcagagcttgcagtgagctgagatcacgccattgcactccagcctgggcaacagtgttaagactctgtctcaaatataaataaataaataaataaataaataaataaataaaaataaagcgagatgttgccctcaaa

SEQ ID NO: 29 - DNA, 785 bp, Unknown
  Description of Unknown: Untranslated Region Sequence
ggccctgccccgtcggactgcccccagaaagcctcctgccccctgccagtgaagtccttcagtgagcccctccccagccagcccttccctggccccgccggatgtataaatgtaaaaatgaaggaattacattttatatgtgagcgagcaagccggcaagcgagcacagtattatttctccatcccctccctgcctgctccttggcacccccatgctgccttcagggagacaggcagggagggcttggggctgcacctcctaccctcccaccagaacgcaccccactgggagagctggtggtgcagccttcccctccctgtataagacactttgccaaggctctcccctctcgccccatccctgcttgcccgctcccacagcttcctgagggctaattctgggaagggagagttctttgctgcccctgtctggaagacgtggctctgggtgaggtaggcgggaaaggatggagtgttttagttcttgggggaggccaccccaaaccccagccccaactccaggggcacctatgagatggccatgctcaacccccctcccagacaggccctccctgtctccagggcccccaccgaggttcccagggctggagacttcctctggtaaacattcctccagcctcccctcccctggggacgccaaggaggtgggccacacccaggaagggaaagcgggcagccccgttttggggacgtgaacgttttaataatttttgctgaattcctttacaactaaataacacagatattgttataaataaaattgt

SEQ ID NO: 30 - DNA, 3001 bp, Unknown
  Description of Unknown: Untranslated Region Sequence
atattaaggatcaagctgttagctaataatgccacctctgcagttttgggaacaggcaaataaagtatcagtatacatggtgatgtacatctgtagcaaagctcttggagaaaatgaagactgaagaaagcaaagcaaaaactgtatagagagatttttcaaaagcagtaatccctcaattttaaaaaaggattgaaaattctaaatgtctttctgtgcatattttttgtgttaggaatcaaaagtattttataaaaggagaaagaacagcctcattttagatgtagtcctgttggattttttatgcctcctcagtaaccagaaatgttttaaaaaactaagtgtttaggatttcaagacaacattatacatggctctgaaatatctgacacaatgtaaacattgcaggcacctgcattttatgttttttttttcaacaaatgtgactaatttgaaacttttatgaacttctgagctgtccccttgcaattcaaccgcagtttgaattaatcatatcaaatcagttttaattttttaaattgtacttcagagtctatatttcaagggcacattttctcactactattttaatacattaaaggactaaataatctttcagagatgctggaaacaaatcatttgctttatatgtttcattagaataccaatgaaacatacaacttgaaaattagtaatagtatttttgaagatcccatttctaattggagatctctttaatttcgatcaacttataatgtgtagtactatattaagtgcacttgagtggaattcaacatttgactaataaaatgagttcatcatgttggcaagtgatgtggcaattatctctggtgacaaaagagtaaaatcaaatatttctgcctgttacaaatatcaaggaagacctgctactatgaaatagatgacattaatctgtcttcactgtttataatacggatggattttttttcaaatcagtgtgtgttttgaggtcttatgtaattgatgacatttgagagaaatggtggctttttttagctacctctttgttcatttaagcaccagtaaagatcatgtctttttatagaagtgtagattttctttgtgactttgctatcgtgcctaaagctctaaatataggtgaatgtgtgatgaatactcagattatttgtctctctatataattagtttggtactaagtttctcaaaaaattattaacacatgaaagacaatctctaaaccagaaaaagaagtagtacaaattttgttactgtaatgctcgcgtttagtgagtttaaaacacacagtatcttttggttttataatcagtttctattttgctgtgcctgagattaagatctgtgtatgtgtgtgtgtgtgtgtgtgcgtttgtgtgttaaagcagaaaagacttttttaaaagttttaagtgataaatgcaatttgttaattgatcttagatcactagtaaactcagggctgaattataccatgtatattctattagaagaaagtaaacaccatctttattcctgccctttttcttctctcaaagtagttgtagttatatctagaaagaagcaattttgatttcttgaaaaggtagttcctgcactcagtttaaactaaaaataatcatacttggattttatttatttttgtcatagtaaaaattttaatttatatatatttttatttagtattatcttattctttgctatttgccaatcctttgtcatcaattgtgttaaatgaattgaaaattcatgccctgttcattttattttactttattggttaggatatttaaaggatttttgtatatataatttcttaaattaatattccaaaaggttagtggacttagattataaattatggcaaaaatctaaaaacaacaaaaatgatttttatacattctatttcattattcctctttttccaataagtcatacaattggtagatatgacttattttatttttgtattattcactatatctttatgatatttaagtataaataattaaaaaaatttattgtaccttatagtctgtcaccaaaaaaaaaaaattatctgtaggtagtgaaatgctaatgttgatttgtctttaagggcttgttaactatcctttattttctcatttgtcttaaattaggagtttgtgtttaaattactcatctaagcaaaaaatgtatataaatcccattactgggtatatacccaaaggattataaatcatgctgctataaagacacatgcacacgtatgtttattgcagcactattcacaatagcaaagacttggaaccaacccaaatgtccatcaatgatagacttgattaagaaaatgtgcacatatacaccatggaatactatgcagccataaaaaaggatgagttcatgtcctttgtagggacatggataaagctggaaaccatcattctgagcaaactattgcaaggacagaaaaccaaacactgcatgttctcactcataggtgggaattgaacaatgagaacacttggacacaaggtggggaacaccacacaccagggcctgtcatggggtggggggagtggggagggatagcattaggagatatacctaatgtaaatgatgagttaatgggtgcagcacaccaacatggcacatgtatacatatgtagcaaacctgcacgttgtgcacatgtaccctagaacttaaagtataattaaaaaaaaaaagaaaacagaagctatttataaagaagttatttgctgaaataaatgtgatctttcccattaaaaaaataaagaaattttggggtaaaaaaacacaatatattgtattcttgaaaaattctaagagagtggatgtgaagtgttctcaccacaaaagtgataactaattgaggtaatgcacatattaattagaaagattttgtcattccacaatgtatatatacttaaaaatatgttatacacaataaatacatacattaaaaaataagtaaatgta

SEQ ID NO: 31 - DNA, 1037 bp, Unknown
  Description of Unknown: Untranslated Region Sequence
cccaccctgcacgccggcaccaaaccctgtcctcccacccctccccactcatcactaaacagagtaaaatgtgatgcgaattttcccgaccaacctgattcgctagattttttttaaggaaaagcttggaaagccaggacacaacgctgctgcctgctttgtgcagggtcctccggggctcagccctgagttggcatcacctgcgcagggccctctggggctcagccctgagctagtgtcacctgcacagggccctctgaggctcagccctgagctggcgtcacctgtgcagggccctctggggctcagccctgagctggcctcacctgggttccccaccccgggctctcctgccctgccctcctgcccgccctccctcctgcctgcgcagctccttccctaggcacctctgtgctgcatcccaccagcctgagcaagacgccctctcggggcctgtgccgcactagcctccctctcctctgtccccatagctggtttttcccaccaatcctcacctaacagttactttacaattaaactcaaagcaagctcttctcctcagcttggggcagccattggcctctgtctcgttttgggaaaccaaggtcaggaggccgttgcagacataaatctcggcgactcggccccgtctcctgagggtcctgctggtgaccggcctggaccttggccctacagccctggaggccgctgctgaccagcactgaccccgacctcagagagtactcgcaggggcgctggctgcactcaagaccctcgagattaacggtgctaaccccgtctgctcctccctcccgcagagactggggcctggactggacatgagagccccttggtgccacagagggctgtgtcttactagaaacaacgcaaacctctccttcctcagaatagtgatgtgttcgacgttttatcaaaggccccctttctatgttcatgttagttttgctccttctgtgtttttttctgaaccatatccatgttgctgacttttccaaataaaggttttcactcctctc

SEQ ID NO: 32 - DNA, 577 bp, Unknown
  Description of Unknown: Untranslated Region Sequence
agaggcctgcctccagggctggactgaggcctgagcgctcctgccgcagagctggccgcgccaaataatgtctctgtgagactcgagaactttcatttttttccaggctggttcggatttggggtggattttggttttgttcccctcctccactctcccccaccccctccccgcccttttttttttttttttttaaactggtattttatctttgattctccttcagccctcacccctggttctcatctttcttgatcaacatcttttcttgcctctgtccccttctctcatctcttagctcccctccaacctggggggcagtggtgtggagaagccacaggcctgagatttcatctgctctccttcctggagcccagaggagggcagcagaagggggtggtgtctccaaccccccagcactgaggaagaacggggctcttctcatttcacccctccctttctcccctgcccccaggactgggccacttctgggtggggcagtgggtcccagattggctcacactgagaatgtaagaactacaaacaaaatttctattaaattaaattttgtgtctcc

SEQ ID NO: 33 - DNA, 2212 bp, Unknown
  Description of Unknown: Untranslated Region Sequence
ctccctccatcccaacctggctccctcccacccaaccaactttccccccaacccggaaacagacaagcaacccaaactgaaccccctcaaaagccaaaaaatgggagacaatttcacatggactttggaaaatatttttttcctttgcattcatctctcaaacttagtttttatctttgaccaaccgaacatgaccaaaaaccaaaagtgcattcaaccttaccaaaaaaaaaaaaaaaaaaagaataaataaataactttttaaaaaaggaagcttggtccacttgcttgaagacccatgcgggggtaagtccctttctgcccgttgggcttatgaaaccccaatgctgccctttctgctcctttctccacaccccccttggggcctcccctccactccttcccaaatctgtctccccagaagacacaggaaacaatgtattgtctgcccagcaatcaaaggcaatgctcaaacacccaagtggcccccaccctcagcccgctcctgcccgcccagcacccccaggccctgggggacctggggttctcagactgccaaagaagccttgccatctggcgctcccatggctcttgcaacatctccccttcgtttttgagggggtcatgccgggggagccaccagcccctcactgggttcggaggagagtcaggaagggccacgacaaagcagaaacatcggatttggggaacgcgtgtcaatcccttgtgccgcagggctgggcgggagagactgttctgttccttgtgtaactgtgttgctgaaagactacctcgttcttgtcttgatgtgtcaccggggcaactgcctgggggcggggatgggggcagggtggaagcggctccccattttataccaaaggtgctacatctatgtgatgggtggggtggggagggaatcactggtgctatagaaattgagatgcccccccaggccagcaaatgttcctttttgttcaaagtctatttttattccttgatatttttctttttttttttttttttttgtggatggggacttgtgaatttttctaaaggtgctatttaacatgggaggagagcgtgtgcggctccagcccagcccgctgctcactttccaccctctctccacctgcctctggcttctcaggcctctgctctccgacctctctcctctgaaaccctcctccacagctgcagcccatcctcccggctccctcctagtctgtcctgcgtcctctgtccccgggtttcagagacaacttcccaaagcacaaagcagtttttccccctaggggtgggaggaagcaaaagactctgtacctattttgtatgtgtataataatttgagatgtttttaattattttgattgctggaataaagcatgtggaaatgacccaaacataatccgcagtggcctcctaatttccttctttggagttgggggaggggtagacatggggaaggggctttggggtgatgggcttgccttccattcctgccctttccctccccactattctcttctagatccctccataaccccactcccctttctctcacccttcttataccgcaaacctttctacttcctctttcattttctattcttgcaatttccttgcaccttttccaaatcctcttctcccctgcaataccatacaggcaatccacgtgcacaacacacacacacactcttcacatctggggttgtccaaacctcatacccactccccttcaagcccatccactctccaccccctggatgccctgcacttggtggcggtgggatgctcatggatactgggagggtgaggggagtggaacccgtgaggaggacctgggggcctctccttgaactgacatgaagggtcatctggcctctgctcccttctcacccacgctgacctcctgccgaaggagcaacgcaacaggagaggggtctgctgagcctggcgagggtctgggagggaccaggaggaaggcgtgctccctgctcgctgtcctggccctgggggagtgagggagacagacacctgggagagctgtggggaaggcactcgcaccgtgctcttgggaaggaaggagacctggccctgctcaccacggactgggtgcctcgacctcctgaatccccagaacacaacccccctgggctggggtggtctggggaaccatcgtgcccccgcctcccgcctactcctttttaagctt

SEQ ID NO: 34 - DNA, 729 bp, Unknown
  Description of Unknown: Untranslated Region Sequence
ttggccaggcctgaccctcttggacctttcttctttgccgacaaccactgcccagcagcctctgggacctcggggtcccagggaacccagtccagcctcctggctgttgacttcccattgctcttggagccaccaatcaaagagattcaaagagattcctgcaggccagaggcggaacacacctttatggctggggctctccgtggtgttctggacccagcccctggagacaccattcacttttactgctttgtagtgactcgtgctctccaacctgtcttcctgaaaaaccaaggcccccttcccccacctcttccatggggtgagacttgagcagaacaggggcttccccaagttgcccagaaagactgtctgggtgagaagccatggccagagcttctcccaggcacaggtgttgcaccagggacttctgcttcaagttttggggtaaagacacctggatcagactccaagggctgccctgagtctgggacttctgcctccatggctggtcatgagagcaaaccgtagtcccctggagacagcgactccagagaacctcttgggagacagaagaggcatctgtgcacagctcgatcttctacttgcctgtggggaggggagtgacaggtccacacaccacactgggtcaccctgtcctggatgcctctgaagagagggacagaccgtcagaaactggagagtttctattaaaggtcatttaaacca

SEQ ID NO: 35 - DNA, 847 bp, Unknown
  Description of Unknown: Untranslated Region Sequence
tcctccgggaccccagccctcaggattcctgatgctccaaggcgactgatgggcgctggatgaagtggcacagtcagcttccctgggggctggtgtcatgttgggctcctggggcgggggcacggcctggcatttcacgcattgctgccaccccaggtccacctgtctccactttcacagcctccaagtctgtggctcttcccttctgtcctccgaggggcttgccttctctcgtgtccagtgaggtgctcagtgatcggcttaacttagagaagcccgccccctccccttctccgtctgtcccaagagggtctgctctgagcctgcgttcctaggtggctcggcctcagctgcctgggttgtggccgccctagcatcctgtatgcccacagctactggaatccccgctgctgctccgggccaagcttctggttgattaatgagggcatggggtggtccctcaagaccttcccctaccttttgtggaaccagtgatgcctcaaagacagtgtcccctccacagctgggtgccaggggcaggggatcctcagtatagccggtgaaccctgataccaggagcctgggcctccctgaacccctggcttccagccatctcatcgccagcctcctcctggacctcttggcccccagccccttccccacacagccccagaagggtcccagagctgaccccactccaggacctaggcccagcccctcagcctcatctggagcccctgaagaccagtcccacccacctttctggcctcatctgacactgctccgcatcctgctgtgtgtcctgttccatgttccggttccatccaaatacactttctggaacaaa

SEQ ID NO: 36 - DNA, 110 bp, Unknown
  Description of Unknown: Untranslated Region Sequence
gctggagcctcggtggccatgcttcttgccccttgggcctccccccagcccctcctccccttcctgcacccgtacccccgtggtctttgaataaagtctgagtgggcggc

SEQ ID NO: 37 - protein, 176 aa, Homo sapiens
MRIFAVFIFMTYWHLLNAPYNKINQRILVVDPVTSEHELTCQAEGYPKAEVIWTSSDHQVLSGKTTTTNSKREEKLFNVTSTLRINTTTNEIFYCTFRRLDPEENHTAELVIPELPLAHPPNERTHLVILGAILLCLGVALTFIFRLRKGRMMDVKKCGIQDTNSKKQSDTHLEET

SEQ ID NO: 38 - protein, 290 aa, Homo sapiens
MRIFAVFIFMTYWHLLNAFTVTVPKDLYVVEYGSNMTIECKFPVEKQLDLAALIVYWEMEDKNIIQFVHGEEDLKVQHSSYRQRARLLKDQLSLGNAALQITDVKLQDAGVYRCMISYGGADYKRITVKVNAPYNKINQRILVVDPVTSEHELTCQAEGYPKAEVIWTSSDHQVLSGKTTTTNSKREEKLFNVTSTLRINTTTNEIFYCTFRRLDPEENHTAELVIPELPLAHPPNERTHLVILGAILLCLGVALTFIFRLRKGRMMDVKKCGIQDTNSKKQSDTHLEET

SEQ ID NO: 39 - protein, 203 aa, Homo sapiens
MVRLPLQCVLWGCLLTAVHPEPPTACREKQYLINSQCCSLCQPGQKLVSDCTEFTETECLPCGESEFLDTWNRETHCHQHKYCDPNLGLRVQQKGTSETDTICTCEEGWHCTSEACESCVLHRSCSPGFGVKQIATGVSDTICEPCPVGFFSNVSSAFEKCHPWTRSPGSAESPGGDPHHLRDPVCHPLGAGLYQKGGQEANQ

SEQ ID NO: 40 - protein, 261 aa, Homo sapiens
GRSPLRTRDRVLTNWEDGLTVAYGAVKLIQSLSLQPVGWQQNWGLSSPPTMLLPSRAQSPTELPLAPLAEPNTGCSSLLSWHSTRGELHLWALGLGQMGGSKCGSPLSPLAPTLEALRRPWCGQQGAGGTRGISTDPPSGKGGRAWGRDPLPREGLLRGTAAPAAGGDLTPCLSRPPTPSRNPRRSIFPTIFLAPTLLLQCRRLYMDANRSPRRMAKRVASQCRRDSEAAPTQECGHVGKQAVGQRAWCCCCCGVRVRGWH

SEQ ID NO: 41 - protein, 277 aa, Homo sapiens
MVRLPLQCVLWGCLLTAVHPEPPTACREKQYLINSQCCSLCQPGQKLVSDCTEFTETECLPCGESEFLDTWNRETHCHQHKYCDPNLGLRVQQKGTSETDTICTCEEGWHCTSEACESCVLHRSCSPGFGVKQIATGVSDTICEPCPVGFFSNVSSAFEKCHPWTSCETKDLVVQQAGTNKTDVVCGPQDRLRALVVIPIIFGILFAILLVLVFIKKVAKKPTNKAPHPKQEPQEINFPDDLPGSNTAAPVQETLHGCQPVTQEDGKESRISVQERQ

SEQ ID NO: 42 - protein, 240 aa, Homo sapiens
MIETYNQTSPRSAATGLPISMKIFMYLLTVFLITQMIGSALFAVYLHRRLDKIEDERNLHEDFVFMKTIQRCNTGERSLSLLNCEEIKSQFEGFVKDIMLNKEETKKENSFEMQKVLQWAEKGYYTMSNNLVTLENGKQLTVKRQGLYYIYAQVTFCSNREASSQAPFIASLCLKSPGRFERILLRAANTHSSAKPCGQQSIHLGGVFELQPGASVFVNVTDPSQVSHGTGFTSFGLLKL

SEQ ID NO: 43 - protein, 261 aa, Homo sapiens
MIETYNQTSPRSAATGLPISMKIFMYLLTVFLITQMIGSALFAVYLHRRLDKIEDERNLHEDFVFMKTIQRCNTGERSLSLLNCEEIKSQFEGFVKDIMLNKEETKKENSFEMQKGDQNPQIAAHVISEASSKTTSVLQWAEKGYYTMSNNLVTLENGKQLTVKRQGLYYIYAQVTFCSNREASSQAPFIASLCLKSPGRFERILLRAANTHSSAKPCGQQSIHLGGVFELQPGASVFVNVTDPSQVSHGTGFTSFGLLKL

SEQ ID NO: 44 - protein, 116 aa, Artificial sequence
  Description of Artificial Sequence: Synthetic Protein Sequence
EVQLLESGGGLVQPGGSLRLSCAASGFTFSNYQMAWVRQAPGKGLEWVSSITSEGGSTYYADSVKGRFTISRDNSKNTLYLQMNSLRAEDTAVYYCAKPGKNFDYWGQGTLVTVSS

SEQ ID NO: 45 - protein, 228 aa, Artificial sequence
  Description of Artificial Sequence: Synthetic Protein Sequence
SKYGPPQPSQPAPEFLGGPSVFLFPPKPKDTLMISRTPEVTCVVVDVSQEDPEVQFNWYVDGVEVHNAKTKPREEQFQSTYRVVSVLTVLHQDWLNGKEYKCKVSNKGLPSSIEKTISKAKGQPREPQVYTLPPSQEEMTKNQVSLTCLVKGFYPSDIAVEWESNGQPENNYKTDPPVLDSDGSFFLYSRLTVDKSRWQEGNVFSCSVMHEALHNHYTQKSLSLSLGK

SEQ ID NO: 46 - protein, 129 aa, Artificial sequence
  Description of Artificial Sequence: Synthetic Protein Sequence
VALHRPDVYLLPPAREQLNLRESATITCLVTGFSPADVFVQWMQRGQPLSPEKYVTSAPMPEPQAPGRYFAHSILTVSEEEWNTGETYTCVAHEALPNRVTERTVDKSTGKPTLYNVSLVMSDTAGTCY

SEQ ID NO: 47 - protein, 394 aa, Artificial sequence
  Description of Artificial Sequence: Synthetic Protein Sequence
METDTLLLWVLLLWVPGSTGDYKDDDDKEVQLLESGGGLVQPGGSLRLSCAASGFTFSNYQMAWVRQAPGKGLEWVSSITSEGGSTYYADSVKGRFTISRDNSKNTLYLQMNSLRAEDTAVYYCAKPGKNFDYWGQGTLVTVSSSKYGPPQPSQPAPEFLGGPSVFLFPPKPKDTLMISRTPEVTCVVVDVSQEDPEVQFNWYVDGVEVHNAKTKPREEQFQSTYRVVSVLTVLHQDWLNGKEYKCKVSNKGLPSSIEKTISKAKGQPREPQVYTLPPSQEEMTKNQVSLTCLVKGFYPSDIAVEWESNGQPENNYKTDPPVLDSDGSFFLYSRLTVDKSRWQEGNVFSCSVMHEALHNHYTQKSLSLSLGKSTGKPTLYNVSLVMSDTAGTCY

SEQ ID NO: 48 - protein, 372 aa, Artificial sequence
  Description of Artificial Sequence: Synthetic Protein Sequence
METDTLLLWVLLLWVPGSTGDYKDDDDKEVQLLESGGGLVQPGGSLRLSCAASGFTFSNYQMAWVRQAPGKGLEWVSSITSEGGSTYYADSVKGRFTISRDNSKNTLYLQMNSLRAEDTAVYYCAKPGKNFDYWGQGTLVTVSSSKYGPPQPSQPAPEFLGGPSVFLFPPKPKDTLMISRTPEVTCVVVDVSQEDPEVQFNWYVDGVEVHNAKTKPREEQFQSTYRVVSVLTVLHQDWLNGKEYKCKVSNKGLPSSIEKTISKAKGQPREPQVYTLPPSQEEMTKNQVSLTCLVKGFYPSDIAVEWESNGQPENNYKTDPPVLDSDGSFFLYSRLTVDKSRWQEGNVFSCSVMHEALHNHYTQKSLSLSLGK

SEQ ID NO: 49 - protein, 1722 aa, Homo sapiens
MRTGWATPRRPAGLLMLLFWFFDLAEPSGRAANDPFTIVHGNTGKCIKPVYGWIVADDCDETEDKLWKWVSQHRLFHLHSQKCLGLDITKSVNELRMFSCDSSAMLWWKCEHHSLYGAARYRLALKDGHGTAISNASDVWKKGGSEESLCDQPYHEIYTRDGNSYGRPCEFPFLIDGTWHHDCILDEDHSGPWCATTLNYEYDRKWGICLKPENGCEDNWEKNEQFGSCYQFNTQTALSWKEAYVSCQNQGADLLSINSAAELTYLKEKEGIAKIFWIGLNQLYSARGWEWSDHKPLNFLNWDPDRPSAPTIGGSSCARMDAESGLWQSFSCEAQLPYVCRKPLNNTVELTDVWTYSDTRCDAGWLPNNGFCYLLVNESNSWDKAHAKCKAFSSDLISIHSLADVEVVVTKLHNEDIKEEVWIGLKNINIPTLFQWSDGTEVTLTYWDENEPNVPYNKTPNCVSYLGELGQWKVQSCEEKLKYVCKRKGEKLNDASSDKMCPPDEGWKRHGETCYKIYEDEVPFGTNCNLTITSRFEQEYLNDLMKKYDKSLRKYFWTGLRDVDSCGEYNWATVGGRRRAVTFSNWNFLEPASPGGCVAMSTGKSVGKWEVKDCRSFKALSICKKMSGPLGPEEASPKPDDPCPEGWQSFPASLSCYKVFHAERIVRKRNWEEAERFCQALGAHLSSFSHVDEIKEFLHFLTDQFSGQHWLWIGLNKRSPDLQGSWQWSDRTPVSTIIMPNEFQQDYDIRDCAAVKVFHRPWRRGWHFYDDREFIYLRPFACDTKLEWVCQIPKGRTPKTPDWYNPDRAGIHGPPLIIEGSEYWFVADLHLNYEEAVLYCASNHSFLATITSFVGLKAIKNKIANISGDGQKWWIRISEWPIDDHFTYSRYPWHRFPVTFGEECLYMSAKTWLIDLGKPTDCSTKLPFICEKYNVSSLEKYSPDSAAKVQCSEQWIPFQNKCFLKIKPVSLTFSQASDTCHSYGGTLPSVLSQIEQDFITSLLPDMEATLWIGLRWTAYEKINKWTDNRELTYSNFHPLLVSGRLRIPENFFEEESRYHCALILNLQKSPFTGTWNFTSCSERHFVSLCQKYSEVKSRQTLQNASETVKYLNNLYKIIPKTLTWHSAKRECLKSNMQLVSITDPYQQAFLSVQALLHNSSLWIGLFSQDDELNFGWSDGKRLHFSRWAETNGQLEDCVVLDTDGFWKTVDCNDNQPGAICYYSGNETEKEVKPVDSVKCPSPVLNTPWIPFQNCCYNFIITKNRHMATTQDEVHTKCQKLNPKSHILSIRDEKENNFVLEQLLYFNYMASWVMLGITYRNKSLMWFDKTPLSYTHWRAGRPTIKNEKFLAGLSTDGFWDIQTFKVIEEAVYFHQHSILACKIEMVDYKEEYNTTLPQFMPYEDGIYSVIQKKVTWYEALNMCSQSGGHLASVHNQNGQLFLEDIVKRDGFPLWVGLSSHDGSESSFEWSDGSTFDYIPWKGQTSPGNCVLLDPKGTWKHEKCNSVKDGAICYKPTKSKKLSRLTYSSRCPAAKENGSRWIQYKGHCYKSDQALHSFSEAKKLCSKHDHSATIVSIKDEDENKFVSRLMRENNNITMRVWLGLSQHSVDQSWSWLDGSEVTFVKWENKSKSGVGRCSMLIASNETWKKVECEHGFGRVVCKVPLGPDYTAIAIIVATLSILVLMGGLIWFLFQRHRLHLAGFSSVRYAQGVNEDEIMLPSFHD

SEQ ID NO: 50 - protein, 1817 aa, Homo sapiens
MRTGWATPRRPAGLLMLLFWFFDLAEPSGRAANDPFTIVHGNTGKCIKPVYGWIVADDCDETEDKLWKWVSQHRLFHLHSQKCLGLDITKSVNELRMFSCDSSAMLWWKCEHHSLYGAARYRLALKDGHGTAISNASDVWKKGGSEESLCDQPYHEIYTRDGNSYGRPCEFPFLIDGTWHHDCILDEDHSGPWCATTLNYEYDRKWGICLKPENGCEDNWEKNEQFGSCYQFNTQTALSWKEAYVSCQNQGADLLSINSAAELTYLKEKEGIAKIFWIGLNQLYSARGWEWSDHKPLNFLNWDPDRPSAPTIGGSSCARMDAESGLWQSFSCEAQLPYVCRKPLNNTVELTDVWTYSDTRCDAGWLPNNGFCYLLVNESNSWDKAHAKCKAFSSDLISIHSLADVEVVVTKLHNEDIKEEVWIGLKNINIPTLFQWSDGTEVTLTYWDENEPNVPYNKTPNCVSYLGELGQWKVQSCEEKLKYVCKRKGEKLNDASSDKMCPPDEGWKRHGETCYKIYEDEVPFGTNCNLTITSRFEQEYLNDLMKKYDKSLRKYFWTGLRDVDSCGEYNWATVGGRRRAVTFSNWNFLEPASPGGCVAMSTGKSVGKWEVKDCRSFKALSICKKMSGPLGPEEASPKPDDPCPEGWQSFPASLSCYKVFHAERIVRKRNWEEAERFCQALGAHLSSFSHVDEIKEFLHFLTDQFSGQHWLWIGLNKRSPDLQGSWQWSDRTPVSTIIMPNEFQQDYDIRDCAAVKVFHRPWRRGWHFYDDREFIYLRPFACDTKLEWVCQIPKGRTPKTPDWYNPDRAGIHGPPLIIEGSEYWFVADLHLNYEEAVLYCASNHSFLATITSFVGLKAIKNKIANISGDGQKWWIRISEWPIDDHFTYSRYPWHRFPVTFGEECLYMSAKTWLIDLGKPTDCSTKLPFICEKYNVSSLEKYSPDSAAKVQCSEQWIPFQNKCFLKIKPVSLTFSQASDTCHSYGGTLPSVLSQIEQDFITSLLPDMEATLWIGLRWTAYEKINKWTDNRELTYSNFHPLLVSGRLRIPENFFEEESRYHCALILNLQKSPFTGTWNFTSCSERHFVSLCQKYSEVKSRQTLQNASETVKYLNNLYKIIPKTLTWHSAKRECLKSNMQLVSITDPYQQAFLSVQALLHNSSLWIGLFSQDDELNFGWSDGKRLHFSRWAETNGQLEDCVVLDTDGFWKTVDCNDNQPGAICYYSGNETEKEVKPVDSVKCPSPVLNTPWIPFQNCCYNFIITKNRHMATTQDEVHTKCQKLNPKSHILSIRDEKENNFVLEQLLYFNYMASWVMLGITYRNKSLMWFDKTPLSYTHWRAGRPTIKNEKFLAGLSTDGFWDIQTFKVIEEAVYFHQHSILACKIEMVDYKEEYNTTLPQFMPYEDGIYSVIQKKVTWYEALNMCSQSGGHLASVHNQNGQLFLEDIVKRDGFPLWVGLSSHDGSESSFEWSDGSTFDYIPWKGQTSPGNCVLLDPKGTWKHEKCNSVKDGAICYKPTKSKKLSRLTYSSRCPAAKENGSRWIQYKGHCYKSDQALHSFSEAKKLCSKHDHSATIVSIKDEDENKFVSRLMRENNNITMRVWLGLSQHSVDCPSSTWIQFQDSCYIFLQEAIKVESIEDVRNQCTDHGADMISIHNEEENAFILDTLKKQWKGPDDILLGMFYDTDDASFKWFDNSNMTFDKWTDQDDDEDLVDTCAFLHIKTGEWKKGNCEVSSVEGTLCKTAIPYKRKYLSDNHILISALVIASTVILTVLGAIIWFLYKKHSDSRFTTVFSTAPQSPYNEDCVLVVGEENEYPVQFD

SEQ ID NO: 51 - protein, 1873 aa, Homo sapiens
MRTGWATPRRPAGLLMLLFWFFDLAEPSGRAANDPFTIVHGNTGKCIKPVYGWIVADDCDETEDKLWKWVSQHRLFHLHSQKCLGLDITKSVNELRMFSCDSSAMLWWKCEHHSLYGAARYRLALKDGHGTAISNASDVWKKGGSEESLCDQPYHEIYTRDGNSYGRPCEFPFLIDGTWHHDCILDEDHSGPWCATTLNYEYDRKWGICLKPENGCEDNWEKNEQFGSCYQFNTQTALSWKEAYVSCQNQGADLLSINSAAELTYLKEKEGIAKIFWIGLNQLYSARGWEWSDHKPLNFLNWDPDRPSAPTIGGSSCARMDAESGLWQSFSCEAQLPYVCRKPLNNTVELTDVWTYSDTRCDAGWLPNNGFCYLLVNESNSWDKAHAKCKAFSSDLISIHSLADVEVVVTKLHNEDIKEEVWIGLKNINIPTLFQWSDGTEVTLTYWDENEPNVPYNKTPNCVSYLGELGQWKVQSCEEKLKYVCKRKGEKLNDASSDKMCPPDEGWKRHGETCYKIYEDEVPFGTNCNLTITSRFEQEYLNDLMKKYDKSLRKYFWTGLRDVDSCGEYNWATVGGRRRAVTFSNWNFLEPASPGGCVAMSTGKSVGKWEVKDCRSFKALSICKKMSGPLGPEEASPKPDDPCPEGWQSFPASLSCYKVFHAERIVRKRNWEEAERFCQALGAHLSSFSHVDEIKEFLHFLTDQFSGQHWLWIGLNKRSPDLQGSWQWSDRTPVSTIIMPNEFQQDYDIRDCAAVKVFHRPWRRGWHFYDDREFIYLRPFACDTKLEWVCQIPKGRTPKTPDWYNPDRAGIHGPPLIIEGSEYWFVADLHLNYEEAVLYCASNHSFLATITSFVGLKAIKNKIANISGDGQKWWIRISEWPIDDHFTYSRYPWHRFPVTFGEECLYMSAKTWLIDLGKPTDCSTKLPFICEKYNVSSLEKYSPDSAAKVQCSEQWIPFQNKCFLKIKPVSLTFSQASDTCHSYGGTLPSVLSQIEQDFITSLLPDMEATLWIGLRWTAYEKINKWTDNRELTYSNFHPLLVSGRLRIPENFFEEESRYHCALILNLQKSPFTGTWNFTSCSERHFVSLCQKYSEVKSRQTLQNASETVKYLNNLYKIIPKTLTWHSAKRECLKSNMQLVSITDPYQQAFLSVQALLHNSSLWIGLFSQDDELNFGWSDGKRLHFSRWAETNGQLEDCVVLDTDGFWKTVDCNDNQPGAICYYSGNETEKEVKPVDSVKCPSPVLNTPWIPFQNCCYNFIITKNRHMATTQDEVHTKCQKLNPKSHILSIRDEKENNFVLEQLLYFNYMASWVMLGITYRNKSLMWFDKTPLSYTHWRAGRPTIKNEKFLAGLSTDGFWDIQTFKVIEEAVYFHQHSILACKIEMVDYKEEYNTTLPQFMPYEDGIYSVIQKKVTWYEALNMCSQSGGHLASVHNQNGQLFLEDIVKRDGFPLWVGLSSHDGSESSFEWSDGSTFDYIPWKGQTSPGNCVLLDPKGTWKHEKCNSVKDGAICYKPTKSKKLSRLTYSSRCPAAKENGSRWIQYKGHCYKSDQALHSFSEAKKLCSKHDHSATIVSIKDEDENKFVSRLMRENNNITMRVWLGLSQHSVDQSWSWLDGSEVTFVKWENKSKSGVGRCSMLIASNETWKKVECEHGFGRVVCKVPLDCPSSTWIQFQDSCYIFLQEAIKVESIEDVRNQCTDHGADMISIHNEEENAFILDTLKKQWKGPDDILLGMFYDTDDASFKWFDNSNMTFDKWTDQDDDEDLVDTCAFLHIKTGEWKKGNCEVSSVEGTLCKTAIPYKRKYLSDNHILISALVIASTVILTVLGAIIWFLYKKHSDSRFTTVFSTAPQSPYNEDCVLVVGEENEYPVQFD

SEQ ID NO: 52 - protein, 61 aa, Homo sapiens
MKRFLFLLLTISLLVMVQIQTGLSGQNDTSQTSSPSASSNISGGIFLFFVANAIIHLFCFS

SEQ ID NO: 53 - protein, 235 aa, Homo sapiens
MTVLAPAWSPTTYLLLLLLLSSGLSGTQDCSFQHSPISSDFAVKIRELSDYLLQDYPVTVASNLQDEELCGGLWRLVLAQRWMERLKTVAGSKMQGLLERVNTEIHFVTKCAFQPPPSCLRFVQTNISRLLQETSEQLVALKPWITRQNFSRCLELQCQPDSSTLPPPWSPRPLEATAPTAPQPPLLLLLLLPVGLLLLAAAWCLHWQRTRRRTPRPGEQVPPVPSPQDLLLVEH

SEQ ID NO: 54 - protein, 178 aa, Homo sapiens
MTVLAPAWSPTTYLLLLLLLSSGLSGTQDCSFQHSPISSDFAVKIRELSDYLLQDYPVTVASNLQDEELCGGLWRLVLAQRWMERLKTVAGSKMQGLLERVNTEIHFVTKCAFQPPPSCLRFVQTNISRLLQETSEQLVALKPWITRQNFSRCLELQCQPVETVFHRVSQDGLDLLTS

SEQ ID NO: 55 - protein, 235 aa, Homo sapiens; identical to SEQ ID NO: 53

SEQ ID NO: 56 - protein, 135 aa, Homo sapiens
MACGLVASNLNLKPGECLRVRGEVAPDAKSFVLNLGKDSNNLCLHFNPRFNAHGDANTIVCNSKDGGAWGTEQREAVFPFQPGSVAEVCITFDQANLTVKLPDGYEFKFPNRLNLEAINYMAADGDFKIKCVAFD

SEQ ID NO: 57 - protein, 662 aa, Homo sapiens
MRPQILLLLALLTLGLAAQHQDKVPCKMVDKKVSCQVLGLLQVPSVLPPDTETLDLSGNQLRSILASPLGFYTALRHLDLSTNEISFLQPGAFQALTHLEHLSLAHNRLAMATALSAGGLGPLPRVTSLDLSGNSLYSGLLERLLGEAPSLHTLSLAENSLTRLTRHTFRDMPALEQLDLHSNVLMDIEDGAFEGLPRLTHLNLSRNSLTCISDFSLQQLRVLDLSCNSIEAFQTASQPQAEFQLTWLDLRENKLLHFPDLAALPRLIYLNLSNNLIRLPTGPPQDSKGIHAPSEGWSALPLSAPSGNASGRPLSQLLNLDLSYNEIELIPDSFLEHLTSLCFLNLSRNCLRTFEARRLGSLPCLMLLDLSHNALETLELGARALGSLRTLLLQGNALRDLPPYTFANLASLQRLNLQGNRVSPCGGPDEPGPSGCVAFSGITSLRSLSLVDNEIELLRAGAFLHTPLTELDLSSNPGLEVATGALGGLEASLEVLALQGNGLMVLQVDLPCFICLKRLNLAENRLSHLPAWTQAVSLEVLDLRNNSFSLLPGSAMGGLETSLRRLYLQGNPLSCCGNGWLAAQLHQGRVDVDATQDLICRFSSQEEVSLSHVRPEDCEKGGLKNINLIIILTFILVSAILLTTLAACCCVRRQKFNQQYKA

SEQ ID NO: 58 - protein, 662 aa, Homo sapiens; identical to SEQ ID NO: 57

SEQ ID NO: 59 - protein, 662 aa, Homo sapiens; identical to SEQ ID NO: 57

SEQ ID NO: 60 - protein, 186 aa, Homo sapiens
MRPQILLLLALLTLGLAAQHQDKVPCKMVDKKVSCQVLGLLQVPSVLPPDTETLDLSGNQLRSILASPLGFYTALRHLDLSTNEISFLQPGAFQALTHLEHLSLAHNRLAMATALSAGGLGPLPRVTSLDLSGNSLYSGLLERLLGEAPSLHTLSLAENSLTRLTRHTFRDMPALEQLDLHSNVLM

SEQ ID NO: 61 - protein, 403 aa, Homo sapiens [sequence omitted]

SEQ ID NO: 62 - protein, 78 aa, Homo sapiens
MAHAMENSWTISKEYHIDEEVGFALPNPQENLPDFYNDWMFIAKHLPDLIESGQLRERVEKLNMLSIDHLTDHKSQRL

SEQ ID NO: 63 - protein, 180 aa, Homo sapiens
MAHAMENSWTISKEYHIDEEVGFALPNPQENLPDFYNDWMFIAKHLPDLIESGQLRERVEKLNMLSIDHLTDHKSQRLARLVLGCITMAYVWGKGHGDVRKVLPRNIAVPYCQLSKKLELPPILVYADCVLANWKKKDPNKPLTYENMDVLFSFRDGDCSKGFFLVSLLVEIAAASAIKV

SEQ ID NO: 64 - protein, 403 aa, Homo sapiens [sequence omitted]

SEQ ID NO: 65 - protein, 47 aa, Homo sapiens
MAHAMENSWTISKEYHIDEEVGFALPNPQENLPDFYNDWMFIAKHLP

SEQ ID NO: 66 - protein, 407 aa, Homo sapiens
MEPHRPNVKTAVPLSLESYHISEEYGFLLPDSLKELPDHYRPWMEIANKLPQLIDAHQLQAHVDKMPLLSCQFLKGHREQRLAHLVLSFLTMGYVWQEGEAQPAEVLPRNLALPFVEVSRNLGLPPILVHSDLVLTNWTKKDPDGFLEIGNLETIISFPGGESLHGFILVTALVEKEAVPGIKALVQATNAILQPNQEALLQALQRLRLSIQDITKTLGQMHDYVDPDIFYAGIRIFLSGWKDNPAMPAGLMYEGVSQEPLKYSGGSAAQSTVLHAFDEFLGIRHSKESGDFLYRMRDYMPPSHKAFIEDIHSAPSLRDYILSSGQDHLLTAYNQCVQALAELRSYHITMVTKYLITAAAKAKHGKPNHLPGPPQALKDRGTGGTAVMSFLKSVRDKTLESILHPRG

SEQ ID NO: 67 - protein, 420 aa, Homo sapiens
MLHFHYYDTSNKIMEPHRPNVKTAVPLSLESYHISEEYGFLLPDSLKELPDHYRPWMEIANKLPQLIDAHQLQAHVDKMPLLSCQFLKGHREQRLAHLVLSFLTMGYVWQEGEAQPAEVLPRNLALPFVEVSRNLGLPPILVHSDLVLTNWTKKDPDGFLEIGNLETIISFPGGESLHGFILVTALVEKEAVPGIKALVQATNAILQPNQEALLQALQRLRLSIQDITKTLGQMHDYVDPDIFYAGIRIFLSGWKDNPAMPAGLMYEGVSQEPLKYSGGSAAQSTVLHAFDEFLGIRHSKESGDFLYRMRDYMPPSHKAFIEDIHSAPSLRDYILSSGQDHLLTAYNQCVQALAELRSYHITMVTKYLITAAAKAKHGKPNHLPGPPQALKDRGTGGTAVMSFLKSVRDKTLESILHPRG

SEQ ID NO: 68 - protein, 178 aa, Homo sapiens
MHSSALLCCLVLLTGVRASPGQGTQSENSCTHFPGNLPNMLRDLRDAFSRVKTFFQMKDQLDNLLLKESLLEDFKGYLGCQALSEMIQFYLEEVMPQAENQDPDIKAHVNSLGENLKTLRLRLRRCHRFLPCENKSKAVEQVKNAFNKLQEKGIYKAMSEFDIFINYIEAYMTMKIRN

SEQ ID NO: 69 - protein, 253 aa, Homo sapiens
MWPPGSASQPPPSPAAATGLHPAARPVSLQCRLSMCPARSLLLVATLVLLDHLSLARNLPVATPDPGMFPCLHHSQNLLRAVSNMLQKARQTLEFYPCTSEEIDHEDITKDKTSTVEACLPLELTKNESCLNSRETSFITNGSCLASRKTSFMMALCLSSIYEDLKMYQVEFKTMNAKLLMDPKRQIFLDQNMLAVIDELMQALNFNSETVPQKSSLEEPDFYKTKIKLCILLHAFRIRAVTIDRVMSYLNAS

SEQ ID NO: 70 - protein, 239 aa, Homo sapiens
MWPPGSASQPPPSPAAATGLHPAARPVSLQCRLSMCPARSLLLVATLVLLDHLSLARNLPVATPDPGMFPCLHHSQNLLRAVSNMLQKARQTLEFYPCTSEEIDHEDITKDKTSTVEACLPLELTKNGSCLASRKTSFMMALCLSSIYEDLKMYQVEFKTMNAKLLMDPKRQIFLDQNMLAVIDELMQALNFNSETVPQKSSLEEPDFYKTKIKLCILLHAFRIRAVTIDRVMSYLNAS

SEQ ID NO: 71 - protein, 215 aa, Homo sapiens
MWPPGSASQPPPSPAAATGLHPAARPVSLQCRLSMCPARSLLLVATLVLLDHLSLARNLPVATPDPGMFPCLHHSQNLLRAVSNMLQKNESCLNSRETSFITNGSCLASRKTSFMMALCLSSIYEDLKMYQVEFKTMNAKLLMDPKRQIFLDQNMLAVIDELMQALNFNSETVPQKSSLEEPDFYKTKIKLCILLHAFRIRAVTIDRVMSYLNAS

SEQ ID NO: 72 - protein, 219 aa, Homo sapiens
MCPARSLLLVATLVLLDHLSLARNLPVATPDPGMFPCLHHSQNLLRAVSNMLQKARQTLEFYPCTSEEIDHEDITKDKTSTVEACLPLELTKNESCLNSRETSFITNGSCLASRKTSFMMALCLSSIYEDLKMYQVEFKTMNAKLLMDPKRQIFLDQNMLAVIDELMQALNFNSETVPQKSSLEEPDFYKTKIKLCILLHAFRIRAVTIDRVMSYLNAS

SEQ ID NO: 73 - protein, 229 aa, Homo sapiens
MTPQLLLALVLWASCPPCSGRKGPPAALTLPRVQCRASRYPIAVDCSWTLPPAPNSTSPVSFIATYRLGMAARGHSWPCLQQTPTSTSCTITDVQLFSMAPYVLNVTAVHPWGSSSSFVPFITEHIIKPDPPEGVRLSPLAERQLQVQWEPPGSWPFPEIFSLKYWIRYKRQGAARFHRVGPIEATSFILRAVRPRARYYVQVAAQDLTDYGELSDWSLPATATMSLGK

SEQ ID NO: 74 - protein, 209 aa, Homo sapiens
RKGPPAALTLPRVQCRASRYPIAVDCSWTLPPAPNSTSPVSFIATYRLGMAARGHSWPCLQQTPTSTSCTITDVQLFSMAPYVLNVTAVHPWGSSSSFVPFITEHIIKPDPPEGVRLSPLAERQLQVQWEPPGSWPFPEIFSLKYWIRYKRQGAARFHRVGPIEATSFILRAVRPRARYYVQVAAQDLTDYGELSDWSLPATATMSLGK

SEQ ID NO: 75 - protein, 455 aa, Artificial Sequence
  Description of Artificial Sequence: Synthetic Protein Sequence
MCPARSLLLVATLVLLDHLSLARNLPVATPDPGMFPCLHHSQNLLRAVSNMLQKARQTLEFYPCTSEEIDHEDITKDKTSTVEACLPLELTKNESCLNSRETSFITNGSCLASRKTSFMMALCLSSIYEDLKMYQVEFKTMNAKLLMDPKRQIFLDQNMLAVIDELMQALNFNSETVPQKSSLEEPDFYKTKIKLCILLHAFRIRAVTIDRVMSYLNASGSGATNFSLLKQAGDVEEPGPRKGPPAALTLPRVQCRASRYPIAVDCSWTLPPAPNSTSPVSFIATYRLGMAARGHSWPCLQQTPTSTSCTITDVQLFSMAPYVLNVTAVHPWGSSSSFVPFITEHIIKPDPPEGVRLSPLAERQLQVQWEPPGSWPFPEIFSLKYWIRYKRQGAARFHRVGPIEATSFILRAVRPRARYYVQVAAQDLTDYGELSDWSLPATATMSLGKHHHHHH

SEQ ID NO: 76 - protein, 452 aa, Artificial Sequence
  Description of Artificial Sequence: Synthetic Protein Sequence
MCPARSLLLVATLVLLDHLSLARNLPVATPDPGMFPCLHHSQNLLRAVSNMLQKARQTLEFYPCTSEEIDHEDITKDKTSTVEACLPLELTKNESCLNSRETSFITNGSCLASRKTSFMMALCLSSIYEDLKMYQVEFKTMNAKLLMDPKRQIFLDQNMLAVIDELMQALNFNSETVPQKSSLEEPDFYKTKIKLCILLHAFRIRAVTIDRVMSYLNASGGGSGGGSGGGSGGGSRKGPPAALTLPRVQCRASRYPIAVDCSWTLPPAPNSTSPVSFIATYRLGMAARGHSWPCLQQTPTSTSCTITDVQLFSMAPYVLNVTAVHPWGSSSSFVPFITEHIIKPDPPEGVRLSPLAERQLQVQWEPPGSWPFPEIFSLKYWIRYKRQGAARFHRVGPIEATSFILRAVRPRARYYVQVAAQDLTDYGELSDWSLPATATMSLGKDYKDDDDK

SEQ ID NO: 77 - protein, 669 aa, Artificial Sequence
  Description of Artificial Sequence: Synthetic Protein Sequence
MTPQLLLALVLWASCPPCSGRKGPPAALTLPRVQCRASRYPIAVDCSWTLPPAPNSTSPVSFIATYRLGMAARGHSWPCLQQTPTSTSCTITDVQLFSMAPYVLNVTAVHPWGSSSSFVPFITEHIIKPDPPEGVRLSPLAERQLQVQWEPPGSWPFPEIFSLKYWIRYKRQGAARFHRVGPIEATSFILRAVRPRARYYVQVAAQDLTDYGELSDWSLPATATMSLGKGGGSGGGSGGGSGGGSRNLPVATPDPGMFPCLHHSQNLLRAVSNMLQKARQTLEFYPCTSEEIDHEDITKDKTSTVEACLPLELTKNESCLNSRETSFITNGSCLASRKTSFMMALCLSSIYEDLKMYQVEFKTMNAKLLMDPKRQIFLDQNMLAVIDELMQALNFNSETVPQKSSLEEPDFYKTKIKLCILLHAFRIRAVTIDRVMSYLNASDKTHTCPPCPAPELLGGPSVFLFPPKPKDQLMISRTPEVTCVVVDVSHEDPEVKFNWYVDGVEVHNAKTKPREEQYNSTYRVVSVLTVLHQDWLNGKEYKCKVSNKALPAPIEKTISKAKGQPREPQVYTLPPSREEMTKNQVSLTCLVKGFYPSDIAVEWESNGQPENNYKTTPPVLDSDGSFFLYSKLTVDKSRWQQGNVFSCSVLHEALHNHYTQKSLSLSPGK

SEQ ID NO: 78 - protein, 218 aa, Homo sapiens
MSFVGENSGVKMGSEDWEKDEPQCCLEDPAGSPLEPGPSLPTMNFVHTSPKVKNLNPKKFSIHDQDHKVLVLDSGNLIAVPDKNYIRPEIFFALASSLSSASAEKGSPILLGVSKGEFCLYCDKDKGQSHPSLQLKKEKLMKLAAQKESARRPFIFYRAQVGSWNMLESAAHPGWFICTSCNCNEPVGVTDKFENRKHIEFSFQPVCKAEMSPSEVSD

SEQ ID NO: 79 - protein, 192 aa, Homo sapiens
MSGCDRRETETKGKNSFKKRLRGPKVKNLNPKKFSIHDQDHKVLVLDSGNLIAVPDKNYIRPEIFFALASSLSSASAEKGSPILLGVSKGEFCLYCDKDKGQSHPSLQLKKEKLMKLAAQKESARRPFIFYRAQVGSWNMLESAAHPGWFICTSCNCNEPVGVTDKFENRKHIEFSFQPVCKAEMSPSEVSD

SEQ ID NO: 80 - protein, 157 aa, Homo sapiens
MSFVGENSGVKMGSEDWEKDEPQCCLEEIFFALASSLSSASAEKGSPILLGVSKGEFCLYCDKDKGQSHPSLQLKKEKLMKLAAQKESARRPFIFYRAQVGSWNMLESAAHPGWFICTSCNCNEPVGVTDKFENRKHIEFSFQPVCKAEMSPSEVSD

SEQ ID NO: 81 - protein, 197 aa, Homo sapiens
MSFVGENSGVKMGSEDWEKDEPQCCLEGPKVKNLNPKKFSIHDQDHKVLVLDSGNLIAVPDKNYIRPEIFFALASSLSSASAEKGSPILLGVSKGEFCLYCDKDKGQSHPSLQLKKEKLMKLAAQKESARRPFIFYRAQVGSWNMLESAAHPGWFICTSCNCNEPVGVTDKFENRKHIEFSFQPVCKAEMSPSEVSD

SEQ ID NO: 82 - protein, 178 aa, Homo sapiens
MSFVGENSGVKMGSEDWEKDEPQCCLEDPAGSPLEPGPSLPTMNFVHTKIFFALASSLSSASAEKGSPILLGVSKGEFCLYCDKDKGQSHPSLQLKKEKLMKLAAQKESARRPFIFYRAQVGSWNMLESAAHPGWFICTSCNCNEPVGVTDKFENRKHIEFSFQPVCKAEMSPSEVSD

SEQ ID NO: 83 - protein, 447 aa, Homo sapiens
MIPTFTALLCLGLSLGPRTHMQAGPLPKPTLWAEPGSVISWGNSVTIWCQGTLEAREYRLDKEESPAPWDRQNPLEPKNKARFSIPSMTEDYAGRYRCYYRSPVGWSQPSDPLELVMTGAYSKPTLSALPSPLVTSGKSVTLLCQSRSPMDTFLLIKERAAHPLLHLRSEHGAQQHQAEFPMSPVTSVHGGTYRCFSSHGFSHYLLSHPSDPLELIVSGSLEDPRPSPTRSVSTAAGPEDQPLMPTGSVPHSGLRRHWEVLIGVLVVSILLLSLLLFLLLQHWRQGKHRTLAQRQADFQRPPGAAEPEPKDGGLQRRSSPAADVQGENFCAAVKNTQPEDGVEMDTRSPHDEDPQAVTYAKVKHSRPRREMASPPSPLSGEFLDTKDRQAEEDRQMDTEAAASEAPQDVTYAQLHSFTLRQKATEPPPSQEGASPAEPSVYATLAIH

SEQ ID NO: 84 - protein, 448 aa, Homo sapiens
MIPTFTALLCLGLSLGPRTHMQAGPLPKPTLWAEPGSVISWGNSVTIWCQGTLEAREYRLDKEESPAPWDRQNPLEPKNKARFSIPSMTEDYAGRYRCYYRSPVGWSQPSDPLELVMTGAYSKPTLSALPSPLVTSGKSVTLLCQSRSPMDTFLLIKERAAHPLLHLRSEHGAQQHQAEFPMSPVTSVHGGTYRCFSSHGFSHYLLSHPSDPLELIVSGSLEDPRPSPTRSVSTAAGPEDQPLMPTGSVPHSGLRRHWEVLIGVLVVSILLLSLLLFLLLQHWRQGKHRTLAQRQADFQRPPGAAEPEPKDGGLQRRSSPAADVQGENFCAAVKNTQPEDGVEMDTRQSPHDEDPQAVTYAKVKHSRPRREMASPPSPLSGEFLDTKDRQAEEDRQMDTEAAASEAPQDVTYAQLHSFTLRQKATEPPPSQEGASPAEPSVYATLAIH

SEQ ID NO: 85 - protein, 259 aa, Homo sapiens
MIPTFTALLCLGLSLGPRTHMQAGPLPKPTLWAEPGSVISWGNSVTIWCQGTLEAREYRLDKEESPAPWDRQNPLEPKNKARFSIPSMTEDYAGRYRCYYRSPVGWSQPSDPLELVMTGAYSKPTLSALPSPLVTSGKSVTLLCQSRSPMDTFLLIKERAAHPLLHLRSEHGAQQHQAEFPMSPVTSVHGGTYRCFSSHGFSHYLLSHPSDPLELIVSGSLEDPRPSPTRSVSTAAGPEDQPLMPTGSVPHSGLRRHWE

SEQ ID NO: 86 - protein, 491 aa, Artificial Sequence
  Description of Artificial Sequence: Synthetic Protein Sequence
MIPTFTALLCLGLSLGPRTHMQAGPLPKPTLWAEPGSVISWGNSVTIWCQGTLEAREYRLDKEESPAPWDRQNPLEPKNKARFSIPSMTEDYAGRYRCYYRSPVGWSQPSDPLELVMTGAYSKPTLSALPSPLVTSGKSVTLLCQSRSPMDTFLLIKERAAHPLLHLRSEHGAQQHQAEFPMSPVTSVHGGTYRCFSSHGFSHYLLSHPSDPLELIVSGSLEDPRPSPTRSVSTAAGPEDQPLMPTGSVPHSGLRRHWEEPKSCDKTHTCPPCPAPELLGGPSVFLFPPKPKDTLMISRTPEVTCVVVDVSHEDPEVKFNWYVDGVEVHNAKTKPREEQYNSTYRVVSVLTVLHQDWLNGKEYKCKVSNKALPAPIEKTISKAKGQPREPQVYTLPPSRDELTKNQVSLTCLVKGFYPSDIAVEWESNGQPENNYKTTPPVLDSDGSFFLYSKLTVDKSRWQQGNVFSCSVMHEALHNHYTQKSLSLSPGK

SEQ ID NO: 87 - protein, 503 aa, Artificial  Sequence
  Description of Artificial Sequence: Synthetic Protein Sequence
MIPTFTALLCLGLSLGPRTHMQAGPLPKPTLWAEPGSVISWGNSVTIWCQGTLEAREYRLDKEESPAPWDRQNPLEPKNKARFSIPSMTEDYAGRYRCYYRSPVGWSQPSDPLELVMTGAYSKPTLSALPSPLVTSGKSVTLLCQSRSPMDTFLLIKERAAHPLLHLRSEHGAQQHQAEFPMSPVTSVHGGTYRCFSSHGFSHYLLSHPSDPLELIVSGSLEDPRPSPTRSVSTAAGPEDQPLMPTGSVPHSGLRRHWEGGGGSGGGGSGGGGSAESKYGPPCPPCPAPEAAGGPSVFLFPPKPKDTLMISRTPEVTCVVVDVSQEDPEVQFNWYVDGVEVHNAKTKPREEQFNSTYRVVSVLTVLHQDWLNGKEYKCKVSNKGLPSSIEKTISKAKGQPREPQVYTLPPSQEEMTKNQVSLTCLVKGFYPSDIAVEWESNGQPENNYKTTPPVLDSDGSFFLYSRLTVDKSRWQEGNVFSCSVMHEALHNHYTQKSLSLSLG

SEQ ID NO: 88 - protein, 211 aa, Homo sapiens
MVAHNQVAADNAVSTAAEPRRRPEPSSSSSSSPAAPARPRPCPAVPAPAPGDTHFRTFRSHADYRRITRASALLDACGFYWGPLSVHGAHERLRAEPVGTFLVRDSRQRNCFFALSVKMASGPTSIRVHFQAGRFHLDGSRESFDCLFELLEHYVAAPRRMLGAPLRQRRVRPLQELCRQRIVATVGRENLARIPLNPVLRDYLSSFPFQI

SEQ ID NO: 89 - protein, 19 aa, Artificial Sequence
  Description of Artificial Sequence: TCR Inhibitory Peptide
MYKTPTLKYFGGFNFSQIL

SEQ ID NO: 90 - protein, 11 aa, Artificial Sequence
  Description of Artificial Sequence: TCR Inhibitory Peptide
MYKTPTLKYFG

SEQ ID NO: 91 - protein, 11 aa, Artificial Sequence
  Description of Artificial Sequence: TCR Inhibitory Peptide
MYKIPTLKYFG

SEQ ID NO: 92 - protein, 11 aa, Artificial Sequence
  Description of Artificial Sequence: TCR Inhibitory Peptide
MYKILTLKYFG

SEQ ID NO: 93 - protein, 11 aa, Artificial Sequence
  Description of Artificial Sequence: TCR Inhibitory Peptide
GYKILTLKYFG

SEQ ID NO: 94 - protein, 11 aa, Artificial Sequence
  Description of Artificial Sequence: TCR Inhibitory Peptide
GYRTPTLKVFG

SEQ ID NO: 95 - protein, 11 aa, Artificial Sequence
  Description of Artificial Sequence: TCR Inhibitory Peptide
GFRIPLLKYFG

SEQ ID NO: 96 - protein, 22 aa, Artificial Sequence
  Description of Artificial Sequence: TCR Inhibitory Peptide
GFRIPLLKYFGGFRIPLLKYFG

SEQ ID NO: 97 - protein, 11 aa, Artificial Sequence
  Description of Artificial Sequence: TCR Inhibitory Peptide
GYRTPTLKVFG

SEQ ID NO: 98 - protein, 19 aa, Artificial Sequence
  Description of Artificial Sequence: TCR Inhibitory Peptide
GYRTPTLKVFGGFNFSQIL

SEQ ID NO: 99 - protein, 19 aa, Artificial Sequence
  Description of Artificial Sequence: TCR Inhibitory Peptide
GYKTPTLKYFGGFNFSQIL

SEQ ID NO: 100 - protein, 25 aa, Artificial Sequence
  Description of Artificial Sequence: TCR Inhibitory Peptide
KKKRGYKTPTLKYFGGFNFSQILKR

SEQ ID NO: 101 - protein, 50 aa, Artificial Sequence
  Description of Artificial Sequence: TCR Inhibitory Peptide
KKKRGYKTPTLKYFGGFNFSQILKRKKKRGYKTPTLKYFGGFNFSQILKR

SEQ ID NO: 102 - protein, 16 aa, Artificial Sequence
  Description of Artificial Sequence: TCR Inhibitory Peptide
KKRGYKTPTLKVFGKR

SEQ ID NO: 103 - protein, 32 aa, Artificial Sequence
  Description of Artificial Sequence: TCR Inhibitory Peptide
KKRGYKTPTLKVFGKRKKRGYKTPTLKVFGKR

SEQ ID NO: 104 - protein, 41 aa, Artificial Sequence
  Description of Artificial Sequence: TCR Inhibitory Peptide
AVPVAVWLVSALAMGAGVAGGITGSMSLASGKSLLHEVDKD

SEQ ID NO: 105 - protein, 14 aa, Artificial Sequence
  Description of Artificial Sequence: TCR Inhibitory Peptide
LASGKSLLHEVDKD

SEQ ID NO: 106 - protein, 18 aa, Artificial Sequence
  Description of Artificial Sequence: TCR Inhibitory Peptide
ATDGQLNHRVEKVEKKLT

SEQ ID NO: 107 - protein, 13 aa, Artificial Sequence
  Description of Artificial Sequence: TCR Inhibitory Peptide
LNHRVEKVEKKLT

SEQ ID NO: 108 - protein, 18 aa, Artificial Sequence
  Description of Artificial Sequence: TCR Inhibitory Peptide
ANERNIVKDLKRLENKIN

SEQ ID NO: 109 - protein, 13 aa, Artificial Sequence
  Description of Artificial Sequence: TCR Inhibitory Peptide
IVKDLKRLENKIN

SEQ ID NO: 110 - protein, 14 aa, Artificial Sequence
  Description of Artificial Sequence: TCR Inhibitory Peptide
LASGKSLLHVEKKD

SEQ ID NO: 111 - protein, 14 aa, Artificial Sequence
  Description of Artificial Sequence: TCR Inhibitory Peptide
LASGKRVEHEVDKD

SEQ ID NO: 112 - protein, 14 aa, Artificial Sequence
  Description of Artificial Sequence: TCR Inhibitory Peptide
LASGKDLKHVEKKD

SEQ ID NO: 113 - protein, 14 aa, Artificial Sequence
  Description of Artificial Sequence: TCR Inhibitory Peptide
LASGKSLLHLENKD

SEQ ID NO: 114 - protein, 18 aa, Artificial Sequence
  Description of Artificial Sequence: TCR Inhibitory Peptide
ATDGQLNHRVEKLENKLT

SEQ ID NO: 115 - protein, 18 aa, Artificial Sequence
  Description of Artificial Sequence: TCR Inhibitory Peptide
ANERNIVKRVERLENKIN

SEQ ID NO: 116 - protein, 28 aa, Artificial Sequence
  Description of Artificial Sequence: TCR Inhibitory Peptide
LASGKDLKHVEKKDLASGKDLKHVEKKD

SEQ ID NO: 117 - protein, 13 aa, Artificial Sequence
  Description of Artificial Sequence: TCR Inhibitory Peptide
LNHRVEKLENKLT

SEQ ID NO: 118 - protein, 18 aa, Artificial Sequence
  Description of Artificial Sequence: TCR Inhibitory Peptide
KKRLNHRVEKLENKLTKR

SEQ ID NO: 119 - protein, 15 aa, Artificial Sequence
  Description of Artificial Sequence: TCR Inhibitory Peptide
RNIVKRVEKVEKKLT

SEQ ID NO: 120 - protein, 30 aa, Artificial Sequence
  Description of Artificial Sequence: TCR Inhibitory Peptide
RNIVKRVEKVEKKLTRNIVKRVEKVEKKLT

SEQ ID NO: 121 - protein, 39 aa, Artificial Sequence
  Description of Artificial Sequence: TCR Inhibitory Peptide
GTFTWTLSDSEGKDTPGGYCLTRWMLIEAELKCFGNTAV

SEQ ID NO: 122 - protein, 15 aa, Artificial Sequence
  Description of Artificial Sequence: TCR Inhibitory Peptide
LTRWMLIEAELKCFG

SEQ ID NO: 123 - protein, 39 aa, Artificial Sequence
  Description of Artificial Sequence: TCR Inhibitory Peptide
GTFTWTLSDSSGVENPGGYCLTKWMILAAELKCFGNTAV

SEQ ID NO: 124 - protein, 15 aa, Artificial Sequence
  Description of Artificial Sequence: TCR Inhibitory Peptide
LTKWMILAAELKCFG

SEQ ID NO: 125 - protein, 39 aa, Artificial Sequence
  Description of Artificial Sequence: TCR Inhibitory Peptide
GLFTWTLSDSEGNDMPGGYCLTRSMLIGLDLKCFGNTAI

SEQ ID NO: 126 - protein, 15 aa, Artificial Sequence
  Description of Artificial Sequence: TCR Inhibitory Peptide
LTRSMLIGLDLKCFG

SEQ ID NO: 127 - protein, 39 aa, Artificial Sequence
  Description of Artificial Sequence: TCR Inhibitory Peptide
AFFSWSLTDPLGNEAPGGYCLEKWMLVASELKCFGNTAI

SEQ ID NO: 128 - protein, 15 aa, Artificial Sequence
  Description of Artificial Sequence: TCR Inhibitory Peptide
LEKWMLVASELKCFG

SEQ ID NO: 129 - protein, 17 aa, Artificial Sequence
  Description of Artificial Sequence: TCR Inhibitory Peptide
LQNRRGLDLLFLKEGGL

SEQ ID NO: 130 - protein, 17 aa, Artificial Sequence
  Description of Artificial Sequence: TCR Inhibitory Peptide
ILNRKAIDFLLRRWGGT

SEQ ID NO: 131 - protein, 17 aa, Artificial Sequence
  Description of Artificial Sequence: TCR Inhibitory Peptide
ILNRKAIDFLLQRWGGT

SEQ ID NO: 132 - protein, 17 aa, Artificial Sequence
  Description of Artificial Sequence: TCR Inhibitory Peptide
LINRHAIDFLLTRWGGT

SEQ ID NO: 133 - protein, 17 aa, Artificial Sequence
  Description of Artificial Sequence: TCR Inhibitory Peptide
LQNRRGLDLLFLKEGGL

SEQ ID NO: 134 - protein, 33 aa, Artificial Sequence
  Description of Artificial Sequence: TCR Inhibitory Peptide
VINDTSFVECIPPPQSRPAWNLWNNRRKTFSFL

SEQ ID NO: 135 - protein, 15 aa, Artificial Sequence
  Description of Artificial Sequence: TCR Inhibitory Peptide
QSRPAWNLWNNRRKT

SEQ ID NO: 136 - protein, 22 aa, Artificial Sequence
  Description of Artificial Sequence: TCR Inhibitory Peptide
GYCLTRWMLIEAELKCFGNTAV

SEQ ID NO: 137 - protein, 44 aa, Artificial Sequence
  Description of Artificial Sequence: TCR Inhibitory Peptide
GYGLTRWMLIEAELKCFGNTAVGYGLTRWMLIEAELKCFGNTAV

SEQ ID NO: 138 - protein, 27 aa, Artificial Sequence
  Description of Artificial Sequence: TCR Inhibitory Peptide
KKRGYCLTRWMLIEAELKCFGNTAVKR

SEQ ID NO: 139 - protein, 16 aa, Artificial Sequence
  Description of Artificial Sequence: TCR Inhibitory Peptide
LQNRKAIDLWNNKEGG

SEQ ID NO: 140 - protein, 32 aa, Artificial Sequence
  Description of Artificial Sequence: TCR Inhibitory Peptide
LQNRKAIDLWNNKEGGLQNRKAIDLWNNKEGG

SEQ ID NO: 141 - protein, 16 aa, Artificial Sequence
  Description of Artificial Sequence: TCR Inhibitory Peptide
ILNRRGLDGLDLKEGG

SEQ ID NO: 142 - protein, 32 aa, Artificial Sequence
  Description of Artificial Sequence: TCR Inhibitory Peptide
ILNRRGLDGLDLKEGGILNRRGLDGLDLKEGG

SEQ ID NO: 143 - protein, 21 aa, Artificial Sequence
  Description of Artificial Sequence: TCR Inhibitory Peptide
KKRILNRRGLDGLDLKEGGKR

SEQ ID NO: 144 - protein, 17 aa, Artificial Sequence
  Description of Artificial Sequence: TCR Inhibitory Peptide
CLTKPAWNLLFLKRKTF

SEQ ID NO: 145 - protein, 16 aa, Artificial Sequence
  Description of Artificial Sequence: TCR Inhibitory Peptide
LQNRDLKRLLFLKRKT

SEQ ID NO: 146 - protein, 32 aa, Artificial Sequence
  Description of Artificial Sequence: TCR Inhibitory Peptide
LQNRDLKRLLFLKRKTLQNRDLKRLLFLKRKT

SEQ ID NO: 147 - protein, 20 aa, Artificial Sequence
  Description of Artificial Sequence: TCR Inhibitory Peptide
KKLQNRDLKRLLFLKRKTKR

SEQ ID NO: 148 - protein, 14 aa, Artificial Sequence
  Description of Artificial Sequence: TCR Inhibitory Peptide
GQLNKTPTLKEGGL

SEQ ID NO: 149 - protein, 17 aa, Artificial Sequence
  Description of Artificial Sequence: TCR Inhibitory Peptide
GYCLTRRGLKEVDKEGG

SEQ ID NO: 150 - protein, 34 aa, Artificial Sequence
  Description of Artificial Sequence: TCR Inhibitory Peptide
GYCLTRRGLKEVDKEGGGYCLTRRGLKEVDKEGG

SEQ ID NO: 151 - protein, 21 aa, Artificial Sequence
  Description of Artificial Sequence: TCR Inhibitory Peptide
KKGYCLTRRGLKEVDKEGGKR

SEQ ID NO: 152 - protein, 16 aa, Artificial Sequence
  Description of Artificial Sequence: TCR Inhibitory Peptide
IPPPQSRTPTLKVFGG

SEQ ID NO: 153 - protein, 32 aa, Artificial Sequence
  Description of Artificial Sequence: TCR Inhibitory Peptide
IPPPQSRTPTLKVFGGIPPPQSRTPTLKVFGG

SEQ ID NO: 154 - protein, 21 aa, Artificial Sequence
  Description of Artificial Sequence: TCR Inhibitory Peptide
KKRIPPPQSRTPTLKVFGGKR

SEQ ID NO: 155 - protein, 390 aa, Homo sapiens
MPPSGLRLLPLLLPLLWLLVLTPGRPAAGLSTCKTIDMELVKRKRIEAIRGQILSKLRLASPPSQGEVPPGPLPEAVLALYNSTRDRVAGESAEPEPEPEADYYAKEVTRVLMVETHNEIYDKFKQSTHSIYMFFNTSELREAVPEPVLLSRAELRLLRLKLKVEQHVELYQKYSNNSWRYLSNRLLAPSDSPEWLSFDVTGVVRQWLSRGGEIEGFRLSAHCSCDSRDNTLQVDINGFTTGRRGDLATIHGMNRPFLLLMATPLERAQHLQSSRHRRALDTNYCFSSTEKNCCVRQLYIDFRKDLGWKWIHEPKGYHANFCLGPCPYIWSLDTQYSKVLALYNQHNPGASAAPCCVPQALEPLPIVYYVGRKPKVEQLSNMIVRSCKCS

SEQ ID NO: 156 - protein, 112 aa, Homo sapiens
ALDTNYCFSSTEKNCCVRQLYIDFRKDLGWKWIHEPKGYHANFCLGPCPYIWSLDTQYSKVLALYNQHNPGASAAPCCVPQALEPLPIVYYVGRKPKVEQLSNMIVRSCKCS

SEQ ID NO: 157 - protein, 130 aa, Artificial Sequence
  Description of Artificial Sequence: Synthetic Protein Sequence
MKWVTFISLLFLFSSAYSALDTNYCFSSTEKNCCVRQLYIDFRKDLGWKWIHEPKGYHANFCLGPCPYIWSLDTQYSKVLALYNQHNPGASAAPCCVPQALEPLPIVYYVGRKPKVEQLSNMIVRSCKCS

SEQ ID NO: 158 - protein, 390 aa, Artificial Sequence
  Description of Artificial Sequence: Synthetic Protein Sequence
MPPSGLRLLLLLLPLLWLLVLTPGRPAAGLSTSKTIDMELVKRKRIEAIRGQILSSLRLASPPSQGEVPPGPLPEAVLALYNSTRDRVAGESAEPEPEPEADRRAKEVTRVLMVETHNEIYDKFKQSTHSIYMFFNTSELREAVPEPVLLSRAELRLLRLKLKVEQHVELYQKYSNNSWRYLSNRLLAPSDSPEWLSFDVTGVVRQWLSRGGEIEGFRLSAHCSCDSRDNTLQVDINGFTTGRRGDLATIHGMNRPFLLLMATPLERAQHLQSSRHRRALDTNYCFSSTEKNCCVRQLYIDFRKDLGWKWIHEPKGYHANFCLGPCPYIWSLDTQYSKVLALYNQHNPGASAAPCCVPQALEPLPIVYYVGRKPKVEQLSNMIVRSCKCS

SEQ ID NO: 159 - protein, 20 aa, Homo sapiens
LQSSGLYSLSSVVTVPSSSL

SEQ ID NO: 160 - protein, 26 aa, Homo sapiens
PAVLQSSGLYSLSSVVTVPSSSLGTQ

SEQ ID NO: 161 - protein, 15 aa, Homo sapiens
YNSTYRVVSVLTVLH

SEQ ID NO: 162 - protein, 21 aa, Homo sapiens
EEQYNSTYRVVSVLTVLHQDW

SEQ ID NO: 163 - protein, 15 aa, Homo sapiens
PGLVRPSQTLSLTCT

SEQ ID NO: 164 - protein, 15 aa, Homo sapiens
WSWVRQPPGRGLEWI

SEQ ID NO: 165 - protein, 24 aa, Homo sapiens
LNNFYPREAKVQWKVDNALQSGNS

SEQ ID NO: 166 - protein, 21 aa, Homo sapiens
VDTSKNQFSLRLSSVTAADTA

SEQ ID NO: 167 - protein, 14 aa, Homo sapiens
FQHWGQGTLVTVSS

SEQ ID NO: 168 - protein, 14 aa, Homo sapiens
KVYACEVTHQGLSS

SEQ ID NO: 169 - protein, 15 aa, Homo sapiens
HPDYSVYLLLRLAKT

SEQ ID NO: 170 - protein, 14 aa, Homo sapiens
LLLRLAKTYETTLE

SEQ ID NO: 171 - protein, 25 aa, Homo sapiens
LGEYKFQNALLVRYTKKVPQVSTPT

SEQ ID NO: 172 - DNA, 3343 bp, Homo sapiens
ggcgcaacgctgagcagctggcgcgtcccgcgcggccccagttctgcgcagcttcccgaggctccgcaccagccgcgcttctgtccgcctgcagggcattccagaaagatgaggatatttgctgtctttatattcatgacctactggcatttgctgaacgccccatacaacaaaatcaaccaaagaattttggttgtggatccagtcacctctgaacatgaactgacatgtcaggctgagggctaccccaaggccgaagtcatctggacaagcagtgaccatcaagtcctgagtggtaagaccaccaccaccaattccaagagagaggagaagcttttcaatgtgaccagcacactgagaatcaacacaacaactaatgagattttctactgcacttttaggagattagatcctgaggaaaaccatacagctgaattggtcatcccagaactacctctggcacatcctccaaatgaaaggactcacttggtaattctgggagccatcttattatgccttggtgtagcactgacattcatcttccgtttaagaaaagggagaatgatggatgtgaaaaaatgtggcatccaagatacaaactcaaagaagcaaagtgatacacatttggaggagacgtaatccagcattggaacttctgatcttcaagcagggattctcaacctgtggtttaggggttcatcggggctgagcgtgacaagaggaaggaatgggcccgtgggatgcaggcaatgtgggacttaaaaggcccaagcactgaaaatggaacctggcgaaagcagaggaggagaatgaagaaagatggagtcaaacagggagcctggagggagaccttgatactttcaaatgcctgaggggctcatcgacgcctgtgacagggagaaaggatacttctgaacaaggagcctccaagcaaatcatccattgctcatcctaggaagacgggttgagaatccctaatttgagggtcagttcctgcagaagtgccctttgcctccactcaatgcctcaatttgttttctgcatgactgagagtctcagtgttggaacgggacagtatttatgtatgagtttttcctatttattttgagtctgtgaggtcttcttgtcatgtgagtgtggttgtgaatgatttcttttgaagatatattgtagtagatgttacaattttgtcgccaaactaaacttgctgcttaatgatttgctcacatctagtaaaacatggagtatttgtaaggtgcttggtctcctctataactacaagtatacattggaagcataaagatcaaaccgttggttgcataggatgtcacctttatttaacccattaatactctggttgacctaatcttattctcagacctcaagtgtctgtgcagtatctgttccatttaaatatcagctttacaattatgtggtagcctacacacataatctcatttcatcgctgtaaccaccctgttgtgataaccactattattttacccatcgtacagctgaggaagcaaacagattaagtaacttgcccaaaccagtaaatagcagacctcagactgccacccactgtccttttataatacaatttacagctatattttactttaagcaattcttttattcaaaaaccatttattaagtgcccttgcaatatcaatcgctgtgccaggcattgaatctacagatgtgagcaagacaaagtacctgtcctcaaggagctcatagtataatgaggagattaacaagaaaatgtattattacaatttagtccagtgtcatagcataaggatgatgcgaggggaaaacccgagcagtgttgccaagaggaggaaataggccaatgtggtctgggacggttggatatacttaaacatcttaataatcagagtaattttcatttacaaagagaggtcggtacttaaaataaccctgaaaaataacactggaattccttttctagcattatatttattcctgatttgcctttgccatataatctaatgcttgtttatatagtgtctggtattgtttaacagttctgtcttttctatttaaatgccactaaattttaaattcatacctttccatgattcaaaattcaaaagatcccatgggagatggttggaaaatctccacttcatcctccaagccattcaagtttcctttccagaagcaactgctactgcctttcattcatatgttcttctaaagatagtctacatttggaaatgtatgttaaaagcacgtatttttaaaatttttttcctaaatagtaacacattgtatgtctgctgtgtactttgctatttttatttattttagtgtttcttatatagcagatggaatgaatttgaagttcccagggctgaggatccatgccttctttgtttctaagttatctttcccatagcttttcattatctttcatatgatccagtatatgttaaatatgtcctacatatacatttagacaaccaccatttgttaagtatttgctctaggacagagtttggatttgtttatgtttgctcaaaaggagacccatgggctctccagggtgcactgagtcaatctagtcctaaaaagcaatcttattattaactctgtatgacagaatcatgtctggaacttttgttttctgctttctgtcaagtataaacttcactttgatgctgtacttgcaaaatcacattttctttctggaaattccggcagtgtaccttgactgctagctaccctgtgccagaaaagcctcattcgttgtgcttgaacccttgaatgccaccagctgtcatcactacacagccctcctaagaggcttcctggaggtttcgagattcagatgccctgggagatcccagagtttcctttccctcttggccatattctggtgtcaatgacaaggagtaccttggctttgccacatgtcaaggctgaagaaacagtgtctccaacagagctccttgtgttatctgtttgtacatgtgcatttgtacagtaattggtgtgacagtgttctttgtgtgaattacaggcaagaattgtggctgagcaaggcacatagtctactcagtctattcctaagtcctaactcctccttgtggtgttggatttgtaaggcactttatcccttttgtctcatgtttcatcgtaaatggcataggcagagatgatacctaattctgcatttgattgtcactttttgtacctgcattaatttaataaaatattcttatttattttgttacttggtacaccagcatgtccattttcttgtttattttgtgtttaataaaatgttcagtttaacatcccagtggagaaagtt

SEQ ID NO: 173 - DNA, 3644 bp, Homo sapiens
gcgtcccgcgcggccccagttctgcgcagcttcccgaggctccgcaccagccgcgcttctgtccgcctgcagggcattccagaaagatgaggatatttgctgtctttatattcatgacctactggcatttgctgaacgcatttactgtcacggttcccaaggacctatatgtggtagagtatggtagcaatatgacaattgaatgcaaattcccagtagaaaaacaattagacctggctgcactaattgtctattgggaaatggaggataagaacattattcaatttgtgcatggagaggaagacctgaaggttcagcatagtagctacagacagagggcccggctgttgaaggaccagctctccctgggaaatgctgcacttcagatcacagatgtgaaattgcaggatgcaggggtgtaccgctgcatgatcagctatggtggtgccgactacaagcgaattactgtgaaagtcaatgccccatacaacaaaatcaaccaaagaattttggttgtggatccagtcacctctgaacatgaactgacatgtcaggctgagggctaccccaaggccgaagtcatctggacaagcagtgaccatcaagtcctgagtggtaagaccaccaccaccaattccaagagagaggagaagcttttcaatgtgaccagcacactgagaatcaacacaacaactaatgagattttctactgcacttttaggagattagatcctgaggaaaaccatacagctgaattggtcatcccagaactacctctggcacatcctccaaatgaaaggactcacttggtaattctgggagccatcttattatgccttggtgtagcactgacattcatcttccgtttaagaaaagggagaatgatggatgtgaaaaaatgtggcatccaagatacaaactcaaagaagcaaagtgatacacatttggaggagacgtaatccagcattggaacttctgatcttcaagcagggattctcaacctgtggtttaggggttcatcggggctgagcgtgacaagaggaaggaatgggcccgtgggatgcaggcaatgtgggacttaaaaggcccaagcactgaaaatggaacctggcgaaagcagaggaggagaatgaagaaagatggagtcaaacagggagcctggagggagaccttgatactttcaaatgcctgaggggctcatcgacgcctgtgacagggagaaaggatacttctgaacaaggagcctccaagcaaatcatccattgctcatcctaggaagacgggttgagaatccctaatttgagggtcagttcctgcagaagtgccctttgcctccactcaatgcctcaatttgttttctgcatgactgagagtctcagtgttggaacgggacagtatttatgtatgagtttttcctatttattttgagtctgtgaggtcttcttgtcatgtgagtgtggttgtgaatgatttcttttgaagatatattgtagtagatgttacaattttgtcgccaaactaaacttgctgcttaatgatttgctcacatctagtaaaacatggagtatttgtaaggtgcttggtctcctctataactacaagtatacattggaagcataaagatcaaaccgttggttgcataggatgtcacctttatttaacccattaatactctggttgacctaatcttattctcagacctcaagtgtctgtgcagtatctgttccatttaaatatcagctttacaattatgtggtagcctacacacataatctcatttcatcgctgtaaccaccctgttgtgataaccactattattttacccatcgtacagctgaggaagcaaacagattaagtaacttgcccaaaccagtaaatagcagacctcagactgccacccactgtccttttataatacaatttacagctatattttactttaagcaattcttttattcaaaaaccatttattaagtgcccttgcaatatcaatcgctgtgccaggcattgaatctacagatgtgagcaagacaaagtacctgtcctcaaggagctcatagtataatgaggagattaacaagaaaatgtattattacaatttagtccagtgtcatagcataaggatgatgcgaggggaaaacccgagcagtgttgccaagaggaggaaataggccaatgtggtctgggacggttggatatacttaaacatcttaataatcagagtaattttcatttacaaagagaggtcggtacttaaaataaccctgaaaaataacactggaattccttttctagcattatatttattcctgatttgcctttgccatataatctaatgcttgtttatatagtgtctggtattgtttaacagttctgtcttttctatttaaatgccactaaattttaaattcatacctttccatgattcaaaattcaaaagatcccatgggagatggttggaaaatctccacttcatcctccaagccattcaagtttcctttccagaagcaactgctactgcctttcattcatatgttcttctaaagatagtctacatttggaaatgtatgttaaaagcacgtatttttaaaatttttttcctaaatagtaacacattgtatgtctgctgtgtactttgctatttttatttattttagtgtttcttatatagcagatggaatgaatttgaagttcccagggctgaggatccatgccttctttgtttctaagttatctttcccatagcttttcattatctttcatatgatccagtatatgttaaatatgtcctacatatacatttagacaaccaccatttgttaagtatttgctctaggacagagtttggatttgtttatgtttgctcaaaaggagacccatgggctctccagggtgcactgagtcaatctagtcctaaaaagcaatcttattattaactctgtatgacagaatcatgtctggaacttttgttttctgctttctgtcaagtataaacttcactttgatgctgtacttgcaaaatcacattttctttctggaaattccggcagtgtaccttgactgctagctaccctgtgccagaaaagcctcattcgttgtgcttgaacccttgaatgccaccagctgtcatcactacacagccctcctaagaggcttcctggaggtttcgagattcagatgccctgggagatcccagagtttcctttccctcttggccatattctggtgtcaatgacaaggagtaccttggctttgccacatgtcaaggctgaagaaacagtgtctccaacagagctccttgtgttatctgtttgtacatgtgcatttgtacagtaattggtgtgacagtgttctttgtgtgaattacaggcaagaattgtggctgagcaaggcacatagtctactcagtctattcctaagtcctaactcctccttgtggtgttggatttgtaaggcactttatcccttttgtctcatgtttcatcgtaaatggcataggcagagatgatacctaattctgcatttgattgtcactttttgtacctgcattaatttaataaaatattcttatttattttgttacttggtacaccagcatgtccattttcttgtttattttgtgtttaataaaatgttcagtttaa

SEQ ID NO: 174 - DNA, 1623 bp, Homo sapiens
tggtcctgccgcctggtctcacctcgctatggttcgtctgcctctgcagtgcgtcctctggggctgcttgctgaccgctgtccatccagaaccacccactgcatgcagagaaaaacagtacctaataaacagtcagtgctgttctttgtgccagccaggacagaaactggtgagtgactgcacagagttcactgaaacggaatgccttccttgcggtgaaagcgaattcctagacacctggaacagagagacacactgccaccagcacaaatactgcgaccccaacctagggcttcgggtccagcagaagggcacctcagaaacagacaccatctgcacctgtgaagaaggctggcactgtacgagtgaggcctgtgagagctgtgtcctgcaccgctcatgctcgcccggctttggggtcaagcagattgctacaggggtttctgataccatctgcgagccctgcccagtcggcttcttctccaatgtgtcatctgctttcgaaaaatgtcacccttggacaaggtccccaggatcggctgagagccctggtggtgatccccatcatcttcgggatcctgtttgccatcctcttggtgctggtctttatcaaaaaggtggccaagaagccaaccaataaggccccccaccccaagcaggaaccccaggagatcaattttcccgacgatcttcctggctccaacactgctgctccagtgcaggagactttacatggatgccaaccggtcacccaggaggatggcaaagagagtcgcatctcagtgcaggagagacagtgaggctgcacccacccaggagtgtggccacgtgggcaaacaggcagttggccagagagcctggtgctgctgctgctgtggcgtgagggtgaggggctggcactgactgggcatagctccccgcttctgcctgcacccctgcagtttgagacaggagacctggcactggatgcagaaacagttcaccttgaagaacctctcacttcaccctggagcccatccagtctcccaacttgtattaaagacagaggcagaagtttggtggtggtggtgttggggtatggtttagtaatatccaccagaccttccgatccagcagtttggtgcccagagaggcatcatggtggcttccctgcgcccaggaagccatatacacagatgcccattgcagcattgtttgtgatagtgaacaactggaagctgcttaactgtccatcagcaggagactggctaaataaaattagaatatatttatacaacagaatctcaaaaacactgttgagtaaggaaaaaaaggcatgctgctgaatgatgggtatggaactttttaaaaaagtacatgcttttatgtatgtatattgcctatggatatatgtataaatacaatatgcatcatatattgatataacaagggttctggaagggtacacagaaaacccacagctcgaagagtggtgacgtctggggtggggaagaagggtctgggggagggttggttaaagggagatttggctttcccataatgcttcatcatttttcccaaaaggagagtgaattcacataatgcttatgtaattaaaaaatcatcaaacatgtaaaaagaaaa

SEQ ID NO: 175 - DNA, 5815 bp, Homo sapiens
cctcgctatggttcgtctgcctctgcagtgcgtcctctggggctgcttgctgaccgctgtccatccagaaccacccactgcatgcagagaaaaacagtacctaataaacagtcagtgctgttctttgtgccagccaggacagaaactggtgagtgactgcacagagttcactgaaacggaatgccttccttgcggtgaaagcgaattcctagacacctggaacagagagacacactgccaccagcacaaatactgcgaccccaacctagggcttcgggtccagcagaagggcacctcagaaacagacaccatctgcacctgtgaagaaggctggcactgtacgagtgaggcctgtgagagctgtgtcctgcaccgctcatgctcgcccggctttggggtcaagcagattggtaagtggctcatctgggaatcagttttggagggggacagaggagcttagggcccaaggtgaggggctgggcagtgggcacttagccccagaggcagaggaagcagaggctccaacctatgtcggtatccccactggagtgagctgcagacgggaccttgttcattctgccttctgccatggggatctgcctttgaagggcaatgggagaagtcctcctggggactgcagctgtcgggggcagtaccacatcgggggaagagtgctcaaggcaggagctcttcccgtcctgcctggccactggctgccttgtgagccggacaggtggtccactgtgatggttaatgtccccctccccacccactcccagctacaggggtttctgataccatctgcgagccctgcccagtcggcttcttctccaatgtgtcatctgctttcgaaaaatgtcacccttggacaaggtataagcactcatcccttgtgtttcctgctctaagagtggcatggagctgcctccattctctccagccacctgtcctgtccctgctcccagaggtccacacacactcatgtacttgtgaagcatctgcagagtggcctcatggccaaccagacaggcacatttccacattttttttgcctgctgtctctttgaggtaatagacactgttgatctctcgcttcatgagagcctcctatcttgggggtattgggacacttattttagctttccttctgcccctcctgcttctcctcagttttcctcgtcttgctttcaccttacctggctttctagggctttctgggctctgggtgctcaccctgagggcctccctctcttacctccaactccaaacccacaccaggtcctgccactggctgtctacgtgttttgggaacttactgtctccactgttgtcactttagtttgggcctcatcactgtggtctgggtgatgccttttctgcctcctggcctccctgcctctgtctctcccctcctgctggttctgtctccatcctcttgccaacatgagcgttcgacagtttctttcaaatcatgacactctcctatttgagatgcttcctgtctctctgttggaactaagactccttagcatggcacccaaccttcctgttgcatttcctgctctctttcctgcatcgcatagcttcatgctacttgcaatcctctgaacacactgttcattctcttccatcaaactcatctgcctggaataccttaaacatgggccccaggccaggcgcggtggctcttgcctgtaatctcagcactttggatgccaaggcgggtggatcacttgaggtcaggagttcaagaccagccagcacaacatggtaaaaacccatctctactaaaaataccaaaaaattagctgggtgtggtggtgggcgcctgtaatcccagctcctcgggaggctgaggcaggagaatcacttgaacccggaaggtggagtttgcagtgagccaagatagcgccactgcactccagcctgggcaacagagcgacattctgtctcaaaaaaaaaaaaaaaaaaaaaaaagactaaagtacatggtttcttcaaagcttctctctctttctcccaccttagatgatttttcctttgcaatgtcctgtgtccattccgccccactcctcctggggccacctggaccaggtcttcatcatctcatatctatatgtttgctgtgtctcctggctggccactcttctgtaatttctcctcctctgagctctctgggcagctgaatcttctcactagtgaagtcgcctggttggatgctgatgagactgaccagctgaatccagttgaaaacttcacacttggcagtgatctggttctaaagacacaattttccatagtttcctaacaccatcctgcatgccacctgccttatttccccacatcacatcgtcccacttagcgggactgcactgctgatccaaattttacatcctttagggcccactcaggtcatatgtcctcagggaagtctttctggaagaaccttaaaccagaggttctcaacagggggcagttttgctccctgtggaacgtttgccaatgtctggacacatttcattcgtcacaaacggagagggggatgctacagggatctggcggatagaggccagggatgctgctgaacatctgcaatgcataggacagcccacccccacccccacacccccagtaaataatgatccagcccaagtgtcactggtgctgacgttgagtaaccctatcttaagctgaactcatcatctctccattccagccttggtggattctgtctcctctgaaccattcccatctcactttagcctacctagatcacaaagcttggcactcattatagactcccctatttattactccttcaagatgtgcaagaatcttttctctgcacttttaagttctgtaagaagagtctgtgtcgttcctataataaccagcataggacgttgcacgtgttgtgtgctcagtgaacctggatttgttgattgttgactgactcactctagagttggaaatcttatgcttggggaaacttaatatctctttctttctctgtgtgtgtgcatttgtgcacgtgtctgtgcatagctgtgagaccaaagacctggttgtgcaacaggcaggcacaaacaagactgatgttgtctgtggtgagtcctggacaatgggccctggagaaagcctaggaaggtgggaactgaagggggagatgaggcacacaggaacactggatgggaaaaaggggaggggaggcagtttgggggtgtggtatcacagctctgccacttatcttgggagtctgggcaaatcacttcccctctcttagcctcagtttcttcatctgtaaaatgggatgataacagcacttccttagtaggttttgattttagagtgagaaggttggcctacagtaaagatcagataatgtaaatcagtgaaaaaggtcaggggtaagaaaattacattctctttacctaacgctaaatgaccagttaatgggtgcagcacaccaacatggtacatgtatacatatgtaacaaacctgcacattatgcacatgtaccctaaagcttaaagtataataataataaaatttaaaaaaacgaaaaatacattctctttgctttttctcaaaatgtactttcctctttgtagggctgggactagaatgaggtgagcaaggcacttgccctcgggcgcaatatttaagaaggtgccataaaagtgtagtaatcaaggtaaattcattttgatgcaatatttttaaaaataaaaattaatgcaaagaaatccatgatgagcaagatagcaacattttaaataaagaacaggatccgaccctgtgtttgcatgaccctgcctcactcacctcaccctaatcctggccctggttccagtaaaaggaataggcagccagcctgcaggccgtagtttgctgacttggtgtccgcctgatgattttcaaaatatggcattaaaagaatgtttaccttgatgactgagtgttttggacatccttttcaattttgtcctgaaacaatttcatcccttgcctcacgctagtctccgccctgccttttggtctttcttttattttcccactttgaaaaaaaaattcggcatgagaaatactttacctttcccctccactcttctataccaaaagcaacatgcagacatgaatcatgctagacctcggcattgggcagagagcagggagtggcggggagcatggtgagcaggtggtgacagccactgccaccactcgcttctagatggttcccaggtggggaggctgccaactggaacccagtcttcccagtttgtaagagaaatcagatgtctaggtttgaatatgtgatctcccagtttaaaaatgtcggcaaatatttccaaacgttaagaaaatgttctggctcctttaaagacatctgccagccacatttccccaaggaccgcggtttgaaccttctgatgtagatgagctctgacattggaagattctggagtctgacaagtcacagcaggttgagggtagggagaaactgcaggtgaggggtgcatgctgaagtcctgatttctccaggtccccaggatcggctgagagccctggtggtgatccccatcatcttcgggatcctgtttgccatcctcttggtgctggtctttatcaaaaaggtggccaagaagccaaccaataaggtaggtcacccctgagaacccgggacagagttttgacaaactgggaagatggcctcacggttgcctatggggcagtaaaactgattcagagtctgtctctgcagccagtggggtggcagcagaattggggactgtcatccccacccaccatgctccttccatccagagctcaatcccccacagaactgcccctggcaccactggcagagcctaacactggctgttcttcactcctttcctggcattcaacgcgtggggagctgcatctttgggccttggggctgggtcaaatgggtgggagcaaatgtggcagccccttaagcccactggctcccactctggaagctcttcgtcgcccttggtgtggccagcagggggcaggaggcacccgaggaatcagcactgacccgccgtctgggaaaggggggagggcttggggaagggatccgcttcccagggaggggctcctcagaggcacagctgcccctgctgctgggggtgacctcacaccttgcctctccaggccccccaccccaagcaggaaccccaggagatcaattttcccgacgatcttcctggctccaacactgctgctccagtgcaggagactttacatggatgccaaccggtcacccaggaggatggcaaagagagtcgcatctcagtgcaggagagacagtgaggctgcacccacccaggagtgtggccacgtgggcaaacaggcagttggccagagagcctggtgctgctgctgctgtggcgtgagggtgaggggctggcactgactgggcatagctccccgcttctgcctgcacccctgcagtttgagacaggagacctggcactggatgcagaaacagttcaccttgaagaacctctcacttcaccctggagcccatccagtctcccaacttgtattaaagacagaggcagaagtttggtggtggtggtgttggggtatggtttagtaatatccaccagaccttccgatccagcagtttggtgcccagagaggcatcatggtggcttccctgcgcccaggaagccatatacacagatgcccattgcagcattgtttgtgatagtgaacaactggaagctgcttaactgtccatcagcaggagactggctaaataaaattagaatatatttatac

SEQ ID NO: 176 - DNA, 1729 bp, Homo sapiens
ggctggggcaggggagtcagcagaggcctcgctcgggcgcccagtggtcctgccgcctggtctcacctcgctatggttcgtctgcctctgcagtgcgtcctctggggctgcttgctgaccgctgtccatccagaaccacccactgcatgcagagaaaaacagtacctaataaacagtcagtgctgttctttgtgccagccaggacagaaactggtgagtgactgcacagagttcactgaaacggaatgccttccttgcggtgaaagcgaattcctagacacctggaacagagagacacactgccaccagcacaaatactgcgaccccaacctagggcttcgggtccagcagaagggcacctcagaaacagacaccatctgcacctgtgaagaaggctggcactgtacgagtgaggcctgtgagagctgtgtcctgcaccgctcatgctcgcccggctttggggtcaagcagattgctacaggggtttctgataccatctgcgagccctgcccagtcggcttcttctccaatgtgtcatctgctttcgaaaaatgtcacccttggacaagctgtgagaccaaagacctggttgtgcaacaggcaggcacaaacaagactgatgttgtctgtggtccccaggatcggctgagagccctggtggtgatccccatcatcttcgggatcctgtttgccatcctcttggtgctggtctttatcaaaaaggtggccaagaagccaaccaataaggccccccaccccaagcaggaaccccaggagatcaattttcccgacgatcttcctggctccaacactgctgctccagtgcaggagactttacatggatgccaaccggtcacccaggaggatggcaaagagagtcgcatctcagtgcaggagagacagtgaggctgcacccacccaggagtgtggccacgtgggcaaacaggcagttggccagagagcctggtgctgctgctgctgtggcgtgagggtgaggggctggcactgactgggcatagctccccgcttctgcctgcacccctgcagtttgagacaggagacctggcactggatgcagaaacagttcaccttgaagaacctctcacttcaccctggagcccatccagtctcccaacttgtattaaagacagaggcagaagtttggtggtggtggtgttggggtatggtttagtaatatccaccagaccttccgatccagcagtttggtgcccagagaggcatcatggtggcttccctgcgcccaggaagccatatacacagatgcccattgcagcattgtttgtgatagtgaacaactggaagctgcttaactgtccatcagcaggagactggctaaataaaattagaatatatttatacaacagaatctcaaaaacactgttgagtaaggaaaaaaaggcatgctgctgaatgatgggtatggaactttttaaaaaagtacatgcttttatgtatgtatattgcctatggatatatgtataaatacaatatgcatcatatattgatataacaagggttctggaagggtacacagaaaacccacagctcgaagagtggtgacgtctggggtggggaagaagggtctgggggagggttggttaaagggagatttggctttcccataatgcttcatcatttttcccaaaaggagagtgaattcacataatgcttatgtaattaaaaaatcatcaaacatgtaaaaagaaaa

SEQ ID NO: 177 - DNA, 1720 bp, Homo sapiens
accatttcaactttaacacagcatgatcgaaacatacaaccaaacttctccccgatctgcggccactggactgcccatcagcatgaaaatttttatgtatttacttactgtttttcttatcacccagatgattgggtcagcactttttgctgtgtatcttcatagaaggttggacaagatagaagatgaaaggaatcttcatgaagattttgtattcatgaaaacgatacagagatgcaacacaggagaaagatccttatccttactgaactgtgaggagattaaaagccagtttgaaggctttgtgaaggatataatgttaaacaaagaggagacgaagaaagaaaacagctttgaaatgcaaaaagtgttacagtgggctgaaaaaggatactacaccatgagcaacaacttggtaaccctggaaaatgggaaacagctgaccgttaaaagacaaggactctattatatctatgcccaagtcaccttctgttccaatcgggaagcttcgagtcaagctccatttatagccagcctctgcctaaagtcccccggtagattcgagagaatcttactcagagctgcaaatacccacagttccgccaaaccttgcgggcaacaatccattcacttgggaggagtatttgaattgcaaccaggtgcttcggtgtttgtcaatgtgactgatccaagccaagtgagccatggcactggcttcacgtcctttggcttactcaaactctgaacagtgtcaccttgcaggctgtggtggagctgacgctgggagtcttcataatacagcacagcggttaagcccaccccctgttaactgcctatttataaccctaggatcctccttatggagaactatttattatacactccaaggcatgtagaactgtaataagtgaattacaggtcacatgaaaccaaaacgggccctgctccataagagcttatatatctgaagcagcaaccccactgatgcagacatccagagagtcctatgaaaagacaaggccattatgcacaggttgaattctgagtaaacagcagataacttgccaagttcagttttgtttctttgcgtgcagtgtctttccatggataatgcatttgatttatcagtgaagatgcagaagggaaatggggagcctcagctcacattcagttatggttgactctgggttcctatggccttgttggagggggccaggctctagaacgtctaacacagtggagaaccgaaaccccccccccccccccgccaccctctcggacagttattcattctctttcaatctctctctctccatctctctctttcagtctctctctctcaacctctttcttccaatctctctttctcaatctctctgtttccctttgtcagtctcttccctcccccagtctctcttctcaatccccctttctaacacacacacacacacacacacacacacacacacacacacacacacacacacagagtcaggccgttgctagtcagttctcttctttccaccctgtccctatctctaccactatagatgagggtgaggagtagggagtgcagccctgagcctgcccactcctcattacgaaatgactgtatttaaaggaaatctattgtatctacctgcagtctccattgtttccagagtgaacttgtaattatcttgttatttattttttgaataataaagacctcttaacatta

SEQ ID NO: 178 - DNA, 1817 bp, Homo sapiens
catgctgcctctgccaccttctctgccagaagataccatttcaactttaacacagcatgatcgaaacatacaaccaaacttctccccgatctgcggccactggactgcccatcagcatgaaaatttttatgtatttacttactgtttttcttatcacccagatgattgggtcagcactttttgctgtgtatcttcatagaaggttggacaagatagaagatgaaaggaatcttcatgaagattttgtattcatgaaaacgatacagagatgcaacacaggagaaagatccttatccttactgaactgtgaggagattaaaagccagtttgaaggctttgtgaaggatataatgttaaacaaagaggagacgaagaaagaaaacagctttgaaatgcaaaaaggtgatcagaatcctcaaattgcggcacatgtcataagtgaggccagcagtaaaacaacatctgtgttacagtgggctgaaaaaggatactacaccatgagcaacaacttggtaaccctggaaaatgggaaacagctgaccgttaaaagacaaggactctattatatctatgcccaagtcaccttctgttccaatcgggaagcttcgagtcaagctccatttatagccagcctctgcctaaagtcccccggtagattcgagagaatcttactcagagctgcaaatacccacagttccgccaaaccttgcgggcaacaatccattcacttgggaggagtatttgaattgcaaccaggtgcttcggtgtttgtcaatgtgactgatccaagccaagtgagccatggcactggcttcacgtcctttggcttactcaaactctgaacagtgtcaccttgcaggctgtggtggagctgacgctgggagtcttcataatacagcacagcggttaagcccaccccctgttaactgcctatttataaccctaggatcctccttatggagaactatttattatacactccaaggcatgtagaactgtaataagtgaattacaggtcacatgaaaccaaaacgggccctgctccataagagcttatatatctgaagcagcaaccccactgatgcagacatccagagagtcctatgaaaagacaaggccattatgcacaggttgaattctgagtaaacagcagataacttgccaagttcagttttgtttctttgcgtgcagtgtctttccatggataatgcatttgatttatcagtgaagatgcagaagggaaatggggagcctcagctcacattcagttatggttgactctgggttcctatggccttgttggagggggccaggctctagaacgtctaacacagtggagaaccgaaaccccccccccccccccgccaccctctcggacagttattcattctctttcaatctctctctctccatctctctctttcagtctctctctctcaacctctttcttccaatctctctttctcaatctctctgtttccctttgtcagtctcttccctcccccagtctctcttctcaatccccctttctaacacacacacacacacacacacacacacacacacacacacacacacacacacagagtcaggccgttgctagtcagttctcttctttccaccctgtccctatctctaccactatagatgagggtgaggagtagggagtgcagccctgagcctgcccactcctcattacgaaatgactgtatttaaaggaaatctattgtatctacctgcagtctccattgtttccagagtgaacttgtaattatcttgttatttattttttgaataataaagacctcttaacatta

SEQ ID NO: 179 - DNA, 6886 bp, Homo sapiens
ccggccggaaggcttgcgccagctcaggatgaggacaggctgggcgacccctcgccgcccggcggggctcctcatgctgctcttctggttcttcgatctcgcggagccctctggccgcgcagctaatgaccccttcaccatcgtccatggaaatacgggcaagtgcatcaagccagtgtatggctggatagtagcagacgactgtgatgaaactgaggacaagttatggaagtgggtgtcccagcatcggctctttcatttgcactcccaaaagtgccttggcctcgatattaccaaatcggtaaatgagctgagaatgttcagctgtgactccagtgccatgctgtggtggaaatgtgagcaccactctctgtacggagctgcccggtaccggctggctctgaaggatggacatggcacagcaatctcaaatgcatctgatgtctggaagaaaggaggctcagaggaaagcctttgtgaccagccttatcatgagatctataccagagatgggaactcttatgggagaccttgtgaatttccattcttaattgatgggacctggcatcatgattgcattcttgatgaagatcatagtgggccatggtgtgccaccaccttaaattatgaatatgaccgaaagtggggcatctgcttaaagcctgaaaacggttgtgaagataattgggaaaagaacgagcagtttggaagttgctaccaatttaatactcagacggctctttcttggaaagaagcttatgtttcatgtcagaatcaaggagctgatttactgagcatcaacagtgctgctgaattaacttaccttaaagaaaaagaaggcattgctaagattttctggattggtttaaatcagctatactctgctagaggctgggaatggtcagaccacaaaccattaaactttctcaactgggatccagacaggcccagtgcacctactataggtggctccagctgtgcaagaatggatgctgagtctggtctgtggcagagcttttcctgtgaagctcaactgccctatgtctgcaggaaaccattaaataatacagtggagttaacagatgtctggacatactcagatacccgctgtgatgcaggctggctgccaaataatggattttgctatctgctggtaaatgaaagtaattcctgggataaggcacatgcgaaatgcaaagccttcagtagtgacctaatcagcattcattctctagcagatgtggaggtggttgtcacaaaactccataatgaggatatcaaagaagaagtgtggataggccttaagaacataaacataccaactttatttcagtggtcagatggtactgaagttactctaacatattgggatgagaatgagccaaatgttccctacaataagacgcccaactgtgtttcctacttaggagagctaggtcagtggaaagtccaatcatgtgaggagaaactaaaatatgtatgcaagagaaagggagaaaaactgaatgacgcaagttctgataagatgtgtcctccagatgagggctggaagagacatggagaaacctgttacaagatttatgaggatgaggtcccttttggaacaaactgcaatctgactatcactagcagatttgagcaagaatacctaaatgatttgatgaaaaagtatgataaatctctaagaaaatacttctggactggcctgagagatgtagattcttgtggagagtataactgggcaactgttggtggaagaaggcgggctgtaaccttttccaactggaattttcttgagccagcttccccgggcggctgcgtggctatgtctactggaaagtctgttggaaagtgggaggtgaaggactgcagaagcttcaaagcactttcaatttgcaagaaaatgagtggaccccttgggcctgaagaagcatcccctaagcctgatgacccctgtcctgaaggctggcagagtttccccgcaagtctttcttgttataaggtattccatgcagaaagaattgtaagaaagaggaactgggaagaagctgaacgattctgccaagcccttggagcacacctttctagcttcagccatgtggatgaaataaaggaatttcttcactttttaacggaccagttcagtggccagcattggctgtggattggtttgaataaaaggagcccagatttacaaggatcctggcaatggagtgatcgtacaccagtgtctactattatcatgccaaatgagtttcagcaggattatgacatcagagactgtgctgctgtcaaggtatttcataggccatggcgaagaggctggcatttctatgatgatagagaatttatttatttgaggccttttgcttgtgatacaaaacttgaatgggtgtgccaaattccaaaaggccgtactccaaaaacaccagactggtacaatccagaccgtgctggaattcatggacctccacttataattgaaggaagtgaatattggtttgttgctgatcttcacctaaactatgaagaagccgtcctgtactgtgccagcaatcacagctttcttgcaactataacatcttttgtgggactaaaagccatcaaaaacaaaatagcaaatatatctggtgatggacagaagtggtggataagaattagcgagtggccaatagatgatcattttacatactcacgatatccatggcaccgctttcctgtgacatttggagaggaatgcttgtacatgtctgccaagacttggcttatcgacttaggtaaaccaacagactgtagtaccaagttgcccttcatctgtgaaaaatataatgtttcttcgttagagaaatacagcccagattctgcagctaaagtgcaatgttctgagcaatggattccttttcagaataagtgttttctaaagatcaaacccgtgtctctcacattttctcaagcaagcgatacctgtcactcctatggtggcacccttccttcagtgttgagccagattgaacaagactttattacatccttgcttccggatatggaagctactttatggattggtttgcgctggactgcctatgaaaagataaacaaatggacagataacagagagctgacgtacagtaactttcacccattattggttagtgggaggctgagaataccagaaaatttttttgaggaagagtctcgctaccactgtgccctaatactcaacctccaaaaatcaccgtttactgggacgtggaattttacatcctgcagtgaacgccactttgtgtctctctgtcagaaatattcagaagttaaaagcagacagacgttgcagaatgcttcagaaactgtaaagtatctaaataatctgtacaaaataatcccaaagactctgacttggcacagtgctaaaagggagtgtctgaaaagtaacatgcagctggtgagcatcacggacccttaccagcaggcattcctcagtgtgcaggcgctccttcacaactcttccttatggatcggactcttcagtcaagatgatgaactcaactttggttggtcagatgggaaacgtcttcattttagtcgctgggctgaaactaatgggcaactcgaagactgtgtagtattagacactgatggattctggaaaacagttgattgcaatgacaatcaaccaggtgctatttgctactattcaggaaatgagactgaaaaagaggtcaaaccagttgacagtgttaaatgtccatctcctgttctaaatactccgtggataccatttcagaactgttgctacaatttcataataacaaagaataggcatatggcaacaacacaggatgaagttcatactaaatgccagaaactgaatccaaaatcacatattctgagtattcgagatgaaaaggagaataactttgttcttgagcaactgctgtacttcaattatatggcttcatgggtcatgttaggaataacttatagaaataagtctcttatgtggtttgataagaccccactgtcatatacacattggagagcaggaagaccaactataaaaaatgagaagtttttggctggtttaagtactgacggcttctgggatattcaaacctttaaagttattgaagaagcagtttattttcaccagcacagcattcttgcttgtaaaattgaaatggttgactacaaagaagaatataatactacactgccacagtttatgccatatgaagatggtatttacagtgttattcaaaaaaaggtaacatggtatgaagcattaaacatgtgttctcaaagtggaggtcacttggcaagcgttcacaaccaaaatggccagctctttctggaagatattgtaaaacgtgatggatttccactatgggttgggctctcaagtcatgatggaagtgaatcaagttttgaatggtctgatggtagtacatttgactatatcccatggaaaggccaaacatctcctggaaattgtgttctcttggatccaaaaggaacttggaaacatgaaaaatgcaactctgttaaggatggtgctatttgttataaacctacaaaatctaaaaagctgtcccgtcttacatattcatcaagatgtccagcagcaaaagagaatgggtcacggtggatccagtacaagggtcactgttacaagtctgatcaggcattgcacagtttttcagaggccaaaaaattgtgttcaaaacatgatcactctgcaactatcgtttccataaaagatgaagatgagaataaatttgtgagcagactgatgagggaaaataataacattaccatgagagtttggcttggattatctcaacattctgttgaccagtcttggagttggttagatggatcagaagtgacatttgtcaaatgggaaaataaaagtaagagtggtgttggaagatgtagcatgttgatagcttcaaatgaaacttggaaaaaagttgaatgtgaacatggttttggaagagttgtctgcaaagtgcctctgggccctgattacacagcaatagctatcatagttgccacactaagtatcttagttctcatgggcggactgatttggttcctcttccaaaggcaccgtttgcacctggcgggtttctcatcagttcgatatgcacaaggagtgaatgaagatgagattatgcttccttctttccatgactaaattcttctaaaagttttctaatttgcactaatgtgttatgagaaattagtcacttaaaatgtcccagtgtcagtatttactctgctccaaagtagaactcttaaatactttttcagttgtttagatcttaggcatgtgctggtatccacagttaattccctgctaaatgccatgtttatcaccctaattaatagaatggaggggactccaaagctggaactgaagtccaaattgtttgtacagtaatatgtttaatgttcattttctctgtatgaatgtgattggtaactaggatatgtatattttaatagaatttttaacaaaacttcttagaaaattaaaataggcatattactaggtgacatgtctactttttaatttttaagagcatccggccaaatgcaaaattagtacctcaaagtaaaaattgaactgtaaactctatcagcattgtttcaaaatagtcatttttagcactggggaaaaataaacaataagacatgcttactttttaatttttatttttttgagactgagtctctctctgttgcccaggctggagtacaatggcgtgatctcggctcactgcaaatctccgcctcccaggttcaagcgattctcctgcctcagcctcctgagtagctgggattacaggcaactgccaccatgcccggctaatttttgtatttttagtagagatggggtttcaccatgttggccaggctggtctcgaactcgtgaccgcaggtgatcctcccgcctcggcctcccaaagtgctgggattacaggcatgagccaccgcgcctggcctctgcttactttttatatagcaaaatgattcctcttggcaagatgtttcttatattattccaaagttatttcataccattattatgtaaatatgaagagtttttttctgtttataattgtttataaaacaatgacttttaaagatttagtgcttaacattttcccaagtgtgggaacattatttttagattgagtaggtaccttgtagcagtgtgctttgcattttctgatgtattacatgactgtttcttttgtaaagagaatcaactaggtatttaagactgataattttacaatttatatgcttcacatagcatgtcaacttttgactaagaattttgttttacttttttaacatgtgttaaacagagaaagggtccatgaaggaaagtgtatgagttgcatttgtaaaaatgagactttttcagtggaactctaaaccttgtgatgactactaacaaatgtaaaattatgagtgattaagaaaacattgctttgtggttatcactttaagttttgacacctagattatagtcttagtaatagcatccactggaaaaggtgaaaatgttttattcggcatttaacttacatttgtactttatttttgtataaaatccatagatttattttacatttagagtatttacactatgataaagttgtaaataattttctaagacagtttttatatagtctacagttgtcctgatttcttattgaatttgttagactagttctcttgtcctgtgatctgtgtacaattttagtcactaagactttcctccaagaactaagccaacttgatgtgaaaagcacagctgtatataatggtgatgtcataataaagttgttttatcttttaagtaaaagtaaaa

SEQ ID NO: 180 - DNA, 5454 bp, Homo sapiens
atgaggacaggctgggcgacccctcgccgcccggcggggctcctcatgctgctcttctggttcttcgatctcgcggagccctctggccgcgcagctaatgaccccttcaccatcgtccatggaaatacgggcaagtgcatcaagccagtgtatggctggatagtagcagacgactgtgatgaaactgaggacaagttatggaagtgggtgtcccagcatcggctctttcatttgcactcccaaaagtgccttggcctcgatattaccaaatcggtaaatgagctgagaatgttcagctgtgactccagtgccatgctgtggtggaaatgtgagcaccactctctgtacggagctgcccggtaccggctggctctgaaggatggacatggcacagcaatctcaaatgcatctgatgtctggaagaaaggaggctcagaggaaagcctttgtgaccagccttatcatgagatctataccagagatgggaactcttatgggagaccttgtgaatttccattcttaattgatgggacctggcatcatgattgcattcttgatgaagatcatagtgggccatggtgtgccaccaccttaaattatgaatatgaccgaaagtggggcatctgcttaaagcctgaaaacggttgtgaagataattgggaaaagaacgagcagtttggaagttgctaccaatttaatactcagacggctctttcttggaaagaagcttatgtttcatgtcagaatcaaggagctgatttactgagcatcaacagtgctgctgaattaacttaccttaaagaaaaagaaggcattgctaagattttctggattggtttaaatcagctatactctgctagaggctgggaatggtcagaccacaaaccattaaactttctcaactgggatccagacaggcccagtgcacctactataggtggctccagctgtgcaagaatggatgctgagtctggtctgtggcagagcttttcctgtgaagctcaactgccctatgtctgcaggaaaccattaaataatacagtggagttaacagatgtctggacatactcagatacccgctgtgatgcaggctggctgccaaataatggattttgctatctgctggtaaatgaaagtaattcctgggataaggcacatgcgaaatgcaaagccttcagtagtgacctaatcagcattcattctctagcagatgtggaggtggttgtcacaaaactccataatgaggatatcaaagaagaagtgtggataggccttaagaacataaacataccaactttatttcagtggtcagatggtactgaagttactctaacatattgggatgagaatgagccaaatgttccctacaataagacgcccaactgtgtttcctacttaggagagctaggtcagtggaaagtccaatcatgtgaggagaaactaaaatatgtatgcaagagaaagggagaaaaactgaatgacgcaagttctgataagatgtgtcctccagatgagggctggaagagacatggagaaacctgttacaagatttatgaggatgaggtcccttttggaacaaactgcaatctgactatcactagcagatttgagcaagaatacctaaatgatttgatgaaaaagtatgataaatctctaagaaaatacttctggactggcctgagagatgtagattcttgtggagagtataactgggcaactgttggtggaagaaggcgggctgtaaccttttccaactggaattttcttgagccagcttccccgggcggctgcgtggctatgtctactggaaagtctgttggaaagtgggaggtgaaggactgcagaagcttcaaagcactttcaatttgcaagaaaatgagtggaccccttgggcctgaagaagcatcccctaagcctgatgacccctgtcctgaaggctggcagagtttccccgcaagtctttcttgttataaggtattccatgcagaaagaattgtaagaaagaggaactgggaagaagctgaacgattctgccaagcccttggagcacacctttctagcttcagccatgtggatgaaataaaggaatttcttcactttttaacggaccagttcagtggccagcattggctgtggattggtttgaataaaaggagcccagatttacaaggatcctggcaatggagtgatcgtacaccagtgtctactattatcatgccaaatgagtttcagcaggattatgacatcagagactgtgctgctgtcaaggtatttcataggccatggcgaagaggctggcatttctatgatgatagagaatttatttatttgaggccttttgcttgtgatacaaaacttgaatgggtgtgccaaattccaaaaggccgtactccaaaaacaccagactggtacaatccagaccgtgctggaattcatggacctccacttataattgaaggaagtgaatattggtttgttgctgatcttcacctaaactatgaagaagccgtcctgtactgtgccagcaatcacagctttcttgcaactataacatcttttgtgggactaaaagccatcaaaaacaaaatagcaaatatatctggtgatggacagaagtggtggataagaattagcgagtggccaatagatgatcattttacatactcacgatatccatggcaccgctttcctgtgacatttggagaggaatgcttgtacatgtctgccaagacttggcttatcgacttaggtaaaccaacagactgtagtaccaagttgcccttcatctgtgaaaaatataatgtttcttcgttagagaaatacagcccagattctgcagctaaagtgcaatgttctgagcaatggattccttttcagaataagtgttttctaaagatcaaacccgtgtctctcacattttctcaagcaagcgatacctgtcactcctatggtggcacccttccttcagtgttgagccagattgaacaagactttattacatccttgcttccggatatggaagctactttatggattggtttgcgctggactgcctatgaaaagataaacaaatggacagataacagagagctgacgtacagtaactttcacccattattggttagtgggaggctgagaataccagaaaatttttttgaggaagagtctcgctaccactgtgccctaatactcaacctccaaaaatcaccgtttactgggacgtggaattttacatcctgcagtgaacgccactttgtgtctctctgtcagaaatattcagaagttaaaagcagacagacgttgcagaatgcttcagaaactgtaaagtatctaaataatctgtacaaaataatcccaaagactctgacttggcacagtgctaaaagggagtgtctgaaaagtaacatgcagctggtgagcatcacggacccttaccagcaggcattcctcagtgtgcaggcgctccttcacaactcttccttatggatcggactcttcagtcaagatgatgaactcaactttggttggtcagatgggaaacgtcttcattttagtcgctgggctgaaactaatgggcaactcgaagactgtgtagtattagacactgatggattctggaaaacagttgattgcaatgacaatcaaccaggtgctatttgctactattcaggaaatgagactgaaaaagaggtcaaaccagttgacagtgttaaatgtccatctcctgttctaaatactccgtggataccatttcagaactgttgctacaatttcataataacaaagaataggcatatggcaacaacacaggatgaagttcatactaaatgccagaaactgaatccaaaatcacatattctgagtattcgagatgaaaaggagaataactttgttcttgagcaactgctgtacttcaattatatggcttcatgggtcatgttaggaataacttatagaaataagtctcttatgtggtttgataagaccccactgtcatatacacattggagagcaggaagaccaactataaaaaatgagaagtttttggctggtttaagtactgacggcttctgggatattcaaacctttaaagttattgaagaagcagtttattttcaccagcacagcattcttgcttgtaaaattgaaatggttgactacaaagaagaatataatactacactgccacagtttatgccatatgaagatggtatttacagtgttattcaaaaaaaggtaacatggtatgaagcattaaacatgtgttctcaaagtggaggtcacttggcaagcgttcacaaccaaaatggccagctctttctggaagatattgtaaaacgtgatggatttccactatgggttgggctctcaagtcatgatggaagtgaatcaagttttgaatggtctgatggtagtacatttgactatatcccatggaaaggccaaacatctcctggaaattgtgttctcttggatccaaaaggaacttggaaacatgaaaaatgcaactctgttaaggatggtgctatttgttataaacctacaaaatctaaaaagctgtcccgtcttacatattcatcaagatgtccagcagcaaaagagaatgggtcacggtggatccagtacaagggtcactgttacaagtctgatcaggcattgcacagtttttcagaggccaaaaaattgtgttcaaaacatgatcactctgcaactatcgtttccataaaagatgaagatgagaataaatttgtgagcagactgatgagggaaaataataacattaccatgagagtttggcttggattatctcaacattctgttgactgtccttcatctacttggattcagttccaagacagttgttacatttttctccaagaagccatcaaagtagaaagcatagaggatgtcagaaatcagtgtactgaccatggagcggacatgataagcatacataatgaagaagaaaatgcttttatactggatactttgaaaaagcaatggaaaggcccagatgatatcctactaggcatgttttatgacacagatgatgcgagtttcaagtggtttgataattcaaatatgacatttgataagtggacagaccaagatgatgatgaggatttagttgacacctgtgcttttctgcacatcaagacaggtgaatggaaaaaaggaaattgtgaagtttcttctgtggaaggaacactatgcaaaacagctatcccatacaaaaggaaatatttatcagataaccacattttaatatcagcattggtgattgctagcacggtaattttgacagttttgggagcaatcatttggttcctgtacaaaaaacattctgattctcgtttcaccacagttttttcaaccgcaccccaatcaccttataatgaagactgtgttttggtagttggagaagaaaatgaatatcctgttcaatttgactaa

SEQ ID NO: 181 - DNA, 5622 bp, Homo sapiens
atgaggacaggctgggcgacccctcgccgcccggcggggctcctcatgctgctcttctggttcttcgatctcgcggagccctctggccgcgcagctaatgaccccttcaccatcgtccatggaaatacgggcaagtgcatcaagccagtgtatggctggatagtagcagacgactgtgatgaaactgaggacaagttatggaagtgggtgtcccagcatcggctctttcatttgcactcccaaaagtgccttggcctcgatattaccaaatcggtaaatgagctgagaatgttcagctgtgactccagtgccatgctgtggtggaaatgtgagcaccactctctgtacggagctgcccggtaccggctggctctgaaggatggacatggcacagcaatctcaaatgcatctgatgtctggaagaaaggaggctcagaggaaagcctttgtgaccagccttatcatgagatctataccagagatgggaactcttatgggagaccttgtgaatttccattcttaattgatgggacctggcatcatgattgcattcttgatgaagatcatagtgggccatggtgtgccaccaccttaaattatgaatatgaccgaaagtggggcatctgcttaaagcctgaaaacggttgtgaagataattgggaaaagaacgagcagtttggaagttgctaccaatttaatactcagacggctctttcttggaaagaagcttatgtttcatgtcagaatcaaggagctgatttactgagcatcaacagtgctgctgaattaacttaccttaaagaaaaagaaggcattgctaagattttctggattggtttaaatcagctatactctgctagaggctgggaatggtcagaccacaaaccattaaactttctcaactgggatccagacaggcccagtgcacctactataggtggctccagctgtgcaagaatggatgctgagtctggtctgtggcagagcttttcctgtgaagctcaactgccctatgtctgcaggaaaccattaaataatacagtggagttaacagatgtctggacatactcagatacccgctgtgatgcaggctggctgccaaataatggattttgctatctgctggtaaatgaaagtaattcctgggataaggcacatgcgaaatgcaaagccttcagtagtgacctaatcagcattcattctctagcagatgtggaggtggttgtcacaaaactccataatgaggatatcaaagaagaagtgtggataggccttaagaacataaacataccaactttatttcagtggtcagatggtactgaagttactctaacatattgggatgagaatgagccaaatgttccctacaataagacgcccaactgtgtttcctacttaggagagctaggtcagtggaaagtccaatcatgtgaggagaaactaaaatatgtatgcaagagaaagggagaaaaactgaatgacgcaagttctgataagatgtgtcctccagatgagggctggaagagacatggagaaacctgttacaagatttatgaggatgaggtcccttttggaacaaactgcaatctgactatcactagcagatttgagcaagaatacctaaatgatttgatgaaaaagtatgataaatctctaagaaaatacttctggactggcctgagagatgtagattcttgtggagagtataactgggcaactgttggtggaagaaggcgggctgtaaccttttccaactggaattttcttgagccagcttccccgggcggctgcgtggctatgtctactggaaagtctgttggaaagtgggaggtgaaggactgcagaagcttcaaagcactttcaatttgcaagaaaatgagtggaccccttgggcctgaagaagcatcccctaagcctgatgacccctgtcctgaaggctggcagagtttccccgcaagtctttcttgttataaggtattccatgcagaaagaattgtaagaaagaggaactgggaagaagctgaacgattctgccaagcccttggagcacacctttctagcttcagccatgtggatgaaataaaggaatttcttcactttttaacggaccagttcagtggccagcattggctgtggattggtttgaataaaaggagcccagatttacaaggatcctggcaatggagtgatcgtacaccagtgtctactattatcatgccaaatgagtttcagcaggattatgacatcagagactgtgctgctgtcaaggtatttcataggccatggcgaagaggctggcatttctatgatgatagagaatttatttatttgaggccttttgcttgtgatacaaaacttgaatgggtgtgccaaattccaaaaggccgtactccaaaaacaccagactggtacaatccagaccgtgctggaattcatggacctccacttataattgaaggaagtgaatattggtttgttgctgatcttcacctaaactatgaagaagccgtcctgtactgtgccagcaatcacagctttcttgcaactataacatcttttgtgggactaaaagccatcaaaaacaaaatagcaaatatatctggtgatggacagaagtggtggataagaattagcgagtggccaatagatgatcattttacatactcacgatatccatggcaccgctttcctgtgacatttggagaggaatgcttgtacatgtctgccaagacttggcttatcgacttaggtaaaccaacagactgtagtaccaagttgcccttcatctgtgaaaaatataatgtttcttcgttagagaaatacagcccagattctgcagctaaagtgcaatgttctgagcaatggattccttttcagaataagtgttttctaaagatcaaacccgtgtctctcacattttctcaagcaagcgatacctgtcactcctatggtggcacccttccttcagtgttgagccagattgaacaagactttattacatccttgcttccggatatggaagctactttatggattggtttgcgctggactgcctatgaaaagataaacaaatggacagataacagagagctgacgtacagtaactttcacccattattggttagtgggaggctgagaataccagaaaatttttttgaggaagagtctcgctaccactgtgccctaatactcaacctccaaaaatcaccgtttactgggacgtggaattttacatcctgcagtgaacgccactttgtgtctctctgtcagaaatattcagaagttaaaagcagacagacgttgcagaatgcttcagaaactgtaaagtatctaaataatctgtacaaaataatcccaaagactctgacttggcacagtgctaaaagggagtgtctgaaaagtaacatgcagctggtgagcatcacggacccttaccagcaggcattcctcagtgtgcaggcgctccttcacaactcttccttatggatcggactcttcagtcaagatgatgaactcaactttggttggtcagatgggaaacgtcttcattttagtcgctgggctgaaactaatgggcaactcgaagactgtgtagtattagacactgatggattctggaaaacagttgattgcaatgacaatcaaccaggtgctatttgctactattcaggaaatgagactgaaaaagaggtcaaaccagttgacagtgttaaatgtccatctcctgttctaaatactccgtggataccatttcagaactgttgctacaatttcataataacaaagaataggcatatggcaacaacacaggatgaagttcatactaaatgccagaaactgaatccaaaatcacatattctgagtattcgagatgaaaaggagaataactttgttcttgagcaactgctgtacttcaattatatggcttcatgggtcatgttaggaataacttatagaaataagtctcttatgtggtttgataagaccccactgtcatatacacattggagagcaggaagaccaactataaaaaatgagaagtttttggctggtttaagtactgacggcttctgggatattcaaacctttaaagttattgaagaagcagtttattttcaccagcacagcattcttgcttgtaaaattgaaatggttgactacaaagaagaatataatactacactgccacagtttatgccatatgaagatggtatttacagtgttattcaaaaaaaggtaacatggtatgaagcattaaacatgtgttctcaaagtggaggtcacttggcaagcgttcacaaccaaaatggccagctctttctggaagatattgtaaaacgtgatggatttccactatgggttgggctctcaagtcatgatggaagtgaatcaagttttgaatggtctgatggtagtacatttgactatatcccatggaaaggccaaacatctcctggaaattgtgttctcttggatccaaaaggaacttggaaacatgaaaaatgcaactctgttaaggatggtgctatttgttataaacctacaaaatctaaaaagctgtcccgtcttacatattcatcaagatgtccagcagcaaaagagaatgggtcacggtggatccagtacaagggtcactgttacaagtctgatcaggcattgcacagtttttcagaggccaaaaaattgtgttcaaaacatgatcactctgcaactatcgtttccataaaagatgaagatgagaataaatttgtgagcagactgatgagggaaaataataacattaccatgagagtttggcttggattatctcaacattctgttgaccagtcttggagttggttagatggatcagaagtgacatttgtcaaatgggaaaataaaagtaagagtggtgttggaagatgtagcatgttgatagcttcaaatgaaacttggaaaaaagttgaatgtgaacatggttttggaagagttgtctgcaaagtgcctctggactgtccttcatctacttggattcagttccaagacagttgttacatttttctccaagaagccatcaaagtagaaagcatagaggatgtcagaaatcagtgtactgaccatggagcggacatgataagcatacataatgaagaagaaaatgcttttatactggatactttgaaaaagcaatggaaaggcccagatgatatcctactaggcatgttttatgacacagatgatgcgagtttcaagtggtttgataattcaaatatgacatttgataagtggacagaccaagatgatgatgaggatttagttgacacctgtgcttttctgcacatcaagacaggtgaatggaaaaaaggaaattgtgaagtttcttctgtggaaggaacactatgcaaaacagctatcccatacaaaaggaaatatttatcagataaccacattttaatatcagcattggtgattgctagcacggtaattttgacagttttgggagcaatcatttggttcctgtacaaaaaacattctgattctcgtttcaccacagttttttcaaccgcaccccaatcaccttataatgaagactgtgttttggtagttggagaagaaaatgaatatcctgttcaatttgactaa

SEQ ID NO: 182 - DNA, 468 bp, Homo sapiens
cagacagccctgagatcacctaaaaagctgctaccaagacagccacgaagatcctaccaaaatgaagcgcttcctcttcctcctactcaccatcagcctcctggttatggtacagatacaaactggactctcaggacaaaacgacaccagccaaaccagcagcccctcagcatccagcaacataagcggaggcattttccttttcttcgtggccaatgccataatccacctcttctgcttcagttgaggtgacacgtctcagccttagccctgtgccccctgaaacagctgccaccatcactcgcaagagaatcccctccatctttgggaggggttgatgccagacatcaccaggttgtagaagttgacaggcagtgccatgggggcaacagccaaaataggggggtaatgatgtaggggccaagcagtgcccagctgggggtcaataaagttacccttgtacttgca

SEQ ID NO: 183 - DNA, 1035 bp, Homo sapiens
tctctggctgtcacccggcttggccccttccacacccaactggggcaagcctgacccggcgacaggaggcatgaggggcccccggccgaaatgacagtgctggcgccagcctggagcccaacaacctatctcctcctgctgctgctgctgagctcgggactcagtgggacccaggactgctccttccaacacagccccatctcctccgacttcgctgtcaaaatccgtgagctgtctgactacctgcttcaagattacccagtcaccgtggcctccaacctgcaggacgaggagctctgcgggggcctctggcggctggtcctggcacagcgctggatggagcggctcaagactgtcgctgggtccaagatgcaaggcttgctggagcgcgtgaacacggagatacactttgtcaccaaatgtgcctttcagcccccccccagctgtcttcgcttcgtccagaccaacatctcccgcctcctgcaggagacctccgagcagctggtggcgctgaagccctggatcactcgccagaacttctcccggtgcctggagctgcagtgtcagcccgactcctcaaccctgccacccccatggagtccccggcccctggaggccacagccccgacagccccgcagccccctctgctcctcctactgctgctgcccgtgggcctcctgctgctggccgctgcctggtgcctgcactggcagaggacgcggcggaggacaccccgccctggggagcaggtgccccccgtccccagtccccaggacctgctgcttgtggagcactgacctggccaaggcctcatcctggggaggatactgaggcacacagaggggagtcaccagccagaggatgcatagcctggacacagaggaagttggctagaggccggtcccttccttgggcccctctcattccctccccagaatggaggcaacgccagaatccagcaccggccccatttacccaactctgtacaaagcccttgtccccatgaaattgtatataaatcatccttttctacc

SEQ ID NO: 184 - DNA, 627 bp, Homo sapiens
tctctggctgtcacccggcttggccccttccacacccaactggggcaagcctgacccggcgacaggaggcatgaggggcccccggccgaaatgacagtgctggcgccagcctggagcccaacaacctatctcctcctgctgctgctgctgagctcgggactcagtgggacccaggactgctccttccaacacagccccatctcctccgacttcgctgtcaaaatccgtgagctgtctgactacctgcttcaagattacccagtcaccgtggcctccaacctgcaggacgaggagctctgcgggggcctctggcggctggtcctggcacagcgctggatggagcggctcaagactgtcgctgggtccaagatgcaaggcttgctggagcgcgtgaacacggagatacactttgtcaccaaatgtgcctttcagcccccccccagctgtcttcgcttcgtccagaccaacatctcccgcctcctgcaggagacctccgagcagctggtggcgctgaagccctggatcactcgccagaacttctcccggtgcctggagctgcagtgtcagcccgtagagacggtgtttcaccgtgtcagccaggatggtctcgatctcctgacctcgtga

SEQ ID NO: 185 - DNA, 1076 bp, Homo sapiens
ggggcatgagggtccgagacttgttcttctgtcccttccaagacccggcgacaggaggcatgaggggcccccggccgaaatgacagtgctggcgccagcctggagcccaacaacctatctcctcctgctgctgctgctgagctcgggactcagtgggacccaggactgctccttccaacacagccccatctcctccgacttcgctgtcaaaatccgtgagctgtctgactacctgcttcaagattacccagtcaccgtggcctccaacctgcaggacgaggagctctgcgggggcctctggcggctggtcctggcacagcgctggatggagcggctcaagactgtcgctgggtccaagatgcaaggcttgctggagcgcgtgaacacggagatacactttgtcaccaaatgtgcctttcagcccccccccagctgtcttcgcttcgtccagaccaacatctcccgcctcctgcaggagacctccgagcagctggtggcgctgaagccctggatcactcgccagaacttctcccggtgcctggagctgcagtgtcagcccgactcctcaaccctgccacccccatggagtccccggcccctggaggccacagccccgacagccccgcagccccctctgctcctcctactgctgctgcccgtgggcctcctgctgctggccgctgcctggtgcctgcactggcagaggacgcggcggaggacaccccgccctggggagcaggtgccccccgtccccagtccccaggacctgctgcttgtggagcactgacctggccaaggcctcatcctgcggagccttaaacaacgcagtgagacagacatctatcatcccattttacaggggaggatactgaggcacacagaggggagtcaccagccagaggatgcatagcctggacacagaggaagttggctagaggccggtcccttccttgggcccctctcattccctccccagaatggaggcaacgccagaatccagcaccggccccatttacccaactctgtacaaagcccttgtccccatgaaattgtatataaatcatccttttctacca

SEQ ID NO: 186 - DNA, 560 bp, Homo sapiens
ttaaaagggtgggagcgtccgggggcccatctctctcgggtggagtcttctgacagctggtgcgcctgcccgggaacatcctcctggactcaatcatggcttgtggtctggtcgccagcaacctgaatctcaaacctggagagtgccttcgagtgcgaggcgaggtggctcctgacgctaagagcttcgtgctgaacctgggcaaagacagcaacaacctgtgcctgcacttcaaccctcgcttcaacgcccacggcgacgccaacaccatcgtgtgcaacagcaaggacggcggggcctgggggaccgagcagcgggaggctgtctttcccttccagcctggaagtgttgcagaggtgtgcatcaccttcgaccaggccaacctgaccgtcaagctgccagatggatacgaattcaagttccccaaccgcctcaacctggaggccatcaactacatggcagctgacggtgacttcaagatcaaatgtgtggcctttgactgaaatcagccagcccatggcccccaataaaggcagctgcctctgctccctctgaaccag

SEQ ID NO: 187 - DNA, 4207 bp, Homo sapiens
ggtggggcagctgagcggcctgctcctcctcgggccgtgaccccggggtctggcgcggggtgggacccgggggcgggtttgcgcaaaatgtgccgagactgcccgggagaggagctgcggccgcgctgagccagagccatgagaccccagatcctgctgctcctggccctgctgaccctaggcctggctgcacaacaccaagacaaagtgccctgtaagatggtggacaagaaggtctcgtgccaggttctgggcctgctccaggtcccctcggtgctcccgccagacactgagacccttgatctatctgggaaccagctgcggagtatcctggcctcacccctgggcttctacacagcacttcgtcacctggacctgagcaccaatgagatcagcttcctccagccaggagccttccaggccctgacccacctggagcacctcagcctggctcacaaccggctggcgatggccactgcgctgagtgctggtggcctgggccccctgccacgcgtgacctccctggacctgtctgggaacagcctgtacagcggcctgctggagcggctgctgggggaggcacccagcctgcataccctctcactggcggagaacagtctgactcgcctcacccgccacaccttccgggacatgcctgcgctggagcagcttgacctgcatagcaacgtgctgatggacatcgaggatggcgccttcgagggtctgccccgcctgacccatctcaacctctccaggaattccctcacctgcatctccgacttcagcctccagcagctgcgggtgctagacctgagctgcaacagcatcgaggcctttcagacggcctcccagccccaggctgagttccagctcacctggcttgacctgcgggagaacaaactgctccatttccccgacctggccgcgctcccgagactcatctacctgaacttgtccaacaacctcatccggctccccacagggccaccccaggacagcaagggcatccacgcaccttccgagggctggtcagccctgcccctctcagcccccagcgggaatgccagcggccgccccctttcccagctcttgaatctggatttgagctacaatgagattgagctcatccccgacagctttcttgagcacctgacctccctgtgcttcctgaacctcagcagaaactgcttgcggacctttgaggcccggcgcttaggctccctgccctgcctgatgctccttgacttaagccacaatgccctggagacactggaactgggcgccagagccctggggtctctgcggacgctgctcctacagggcaatgccctgcgggacctgcccccatacacctttgccaatctggccagcctgcagcggctcaacctgcaggggaaccgagtcagcccctgtggggggccagatgagcctggcccctccggctgtgtggccttctccggcatcacctccctccgcagcctgagcctggtggataatgagatagagctgctcagggcaggggccttcctccacaccccactgactgagctggacctttcttccaatcctgggctggaggtggccacgggggccttgggaggcctggaggcctccttggaggtcctggcactgcagggcaacgggctgatggtcctgcaggtggacctgccctgcttcatctgcctcaagcggctcaatcttgccgagaaccgcctgagccaccttcccgcctggacacaggctgtgtcactggaggtgctggacctgcgaaacaacagcttcagcctcctgccaggcagtgccatgggtggcctggagaccagcctccggcgcctctacctgcaggggaatccactcagctgctgcggcaatggctggctggcagcccagctgcaccagggccgtgtggacgtggacgccacccaggacctgatctgccgcttcagctcccaggaggaggtgtccctgagccacgtgcgtcctgaggactgtgagaaggggggactgaagaacatcaacctcatcatcatcctcaccttcatactggtctctgccatcctcctcaccacgctggccgcctgctgctgcgtccgccggcagaagtttaaccaacagtataaagcctaaagaagccgggagacactctaggtcagtgggggagcctgaggtacagagaagagtgaggactgactcaaggtcacacagtgatccgggatcccagaactctggtctccaaattacagcccaggacacctttctctgccgcctgctgcatcagtgggtgacccccttcccgggctgcactttgggtccagctgtggaagccagaagttgggcggtttcagggacagccgagaataatgttgacctgtcagatcaacaaatcttcactgagcatgtattttgtgccacaccctgctctgggcactgggaatgctgggaaatgagatacattcccgccctcaagaatctcccagtctggtaggagagagtgctgcagagccacgtggccgccacgcagtgtgcttagggcctgaggtgtgaaagcccagggctccagagctcggcaggccccgctggtttggtgcggtgagtcctgccccggctgtgccagggtgagggagggccaagcccaggaggatttgtctgagacatttccaagcagactgtttgtcacgtcttctgagaatgactttcagtctctctgaaaatgaaaagcttaggaccagaagagagaattggagctgtacgagtgtgtctcggatctggtgttgttaggtgggccacggcggctccagcagggtctggttaaggggtccagcccagcactggaccattccgtctcctgctctggacttgccctctcccttcctggcactctcatgttgcataccctgaccccagtgctgctctaagcaccgtccctgcccagccccacttctccatcgcagccccaccttggctgctgagccaggagctaaaaccttagatatctggttctgttttgcacccagcttggcagatgtggatttgaatccaagccttgtgtctgcccctatgtgacagctctatattttatccccgttttataaaagaggaaactgaagttctgaaaatctccttccagggccccagctaactaatgccataggtgagattcaaaccttcatccttctgtctccagggcctgatctttaccactgcaggggctgcaggccgttaagtggacaggaagtggccccacatagcccgagcagggtctggaagcatcctgtgctgtgcacacctgctctctcctctctcccaggcaggcagctgcaggcgctctcctccttctctgcctgtttccctcctcccttcctttccaccctggtgtgggttctcctgttctctctgtgctcttgcattctctcattcccttttcctctattgagcagagcctggagtttgagactatggaatccaacctccccattgcacagatggggaaactgaggcttaggaagagaatgaaacttgtggagagcttatacagagcctctgggggaaaaaagagcccttatttgtggggtgagattgggggttggaccagagtgatgtcctctctcagctatcacatcacaagataatgctggctccaaacttcctttctgtgcctcatcatgcaaggatcttttttccctcttacaaaaacaggtaaaaagcctcacccagatgacccccatccctcataccatggagtcatgagctgtctgggaagaatggacgtgctgggaccaactcaagaccttgttttgctgtcttcatcatcttacctgtgcttggcccacagtctggctcatgatgtgggctcagtaatgtgcgagaaagtgaaaatgccactctctccaccccattttacagaggagaacaccaaggcccagaggaagttaagggagagtcaatgggcagagccagggctaggccctggtggtgtgtggagcacccaggcagacccagtcctggttgggatcacacccacgggtgctactgcacgtaacactcctccttaggcctggaggccaaggtgtgggtccccacgcctgatctttgaaaacactacacagggctgctgtcacttcccagggcccaggcctcagcccaggcctcgggaccaactctttgtataacctacctgaatgtattaaaaactaattttggagaagca

SEQ ID NO: 188 - DNA, 2656 bp, Homo sapiens
ggtggggcagctgagcggcctgctcctcctcgggccgtgaccccggggtctggcgcggggtgggacccgggggcgggtttgcgcaaaatgtgccgagactgcccgggagaggagctgcggccgcgctgagccagagccatgagaccccagatcctgctgctcctggccctgctgaccctaggcctggctgcacaacaccaagacaaagtgccctgtaagatggtggacaagaaggtctcgtgccaggttctgggcctgctccaggtcccctcggtgctcccgccagacactgagacccttgatctatctgggaaccagctgcggagtatcctggcctcacccctgggcttctacacagcacttcgtcacctggacctgagcaccaatgagatcagcttcctccagccaggagccttccaggccctgacccacctggagcacctcagcctggctcacaaccggctggcgatggccactgcgctgagtgctggtggcctgggccccctgccacgcgtgacctccctggacctgtctgggaacagcctgtacagcggcctgctggagcggctgctgggggaggcacccagcctgcataccctctcactggcggagaacagtctgactcgcctcacccgccacaccttccgggacatgcctgcgctggagcagcttgacctgcatagcaacgtgctgatggacatcgaggatggcgccttcgagggtctgccccgcctgacccatctcaacctctccaggaattccctcacctgcatctccgacttcagcctccagcagctgcgggtgctagacctgagctgcaacagcatcgaggcctttcagacggcctcccagccccaggctgagttccagctcacctggcttgacctgcgggagaacaaactgctccatttccccgacctggccgcgctcccgagactcatctacctgaacttgtccaacaacctcatccggctccccacagggccaccccaggacagcaagggcatccacgcaccttccgagggctggtcagccctgcccctctcagcccccagcgggaatgccagcggccgccccctttcccagctcttgaatctggatttgagctacaatgagattgagctcatccccgacagctttcttgagcacctgacctccctgtgcttcctgaacctcagcagaaactgcttgcggacctttgaggcccggcgcttaggctccctgccctgcctgatgctccttgacttaagccacaatgccctggagacactggaactgggcgccagagccctggggtctctgcggacgctgctcctacagggcaatgccctgcgggacctgcccccatacacctttgccaatctggccagcctgcagcggctcaacctgcaggggaaccgagtcagcccctgtggggggccagatgagcctggcccctccggctgtgtggccttctccggcatcacctccctccgcagcctgagcctggtggataatgagatagagctgctcagggcaggggccttcctccacaccccactgactgagctggacctttcttccaatcctgggctggaggtggccacgggggccttgggaggcctggaggcctccttggaggtcctggcactgcagggcaacgggctgatggtcctgcaggtggacctgccctgcttcatctgcctcaagcggctcaatcttgccgagaaccgcctgagccaccttcccgcctggacacaggctgtgtcactggaggtgctggacctgcgaaacaacagcttcagcctcctgccaggcagtgccatgggtggcctggagaccagcctccggcgcctctacctgcaggggaatccactcagctgctgcggcaatggctggctggcagcccagctgcaccagggccgtgtggacgtggacgccacccaggacctgatctgccgcttcagctcccaggaggaggtgtccctgagccacgtgcgtcctgaggactgtgagaaggggggactgaagaacatcaacctcatcatcatcctcaccttcatactggtctctgccatcctcctcaccacgctggccgcctgctgctgcgtccgccggcagaagtttaaccaacagtataaagcctaaagaagccgggagacactctaggtaaaaagcctcacccagatgacccccatccctcataccatggagtcatgagctgtctgggaagaatggacgtgctgggaccaactcaagaccttgttttgctgtcttcatcatcttacctgtgcttggcccacagtctggctcatgatgtgggctcagtaatgtgcgagaaagtgaaaatgccactctctccaccccattttacagaggagaacaccaaggcccagaggaagttaagggagagtcaatgggcagagccagggctaggccctggtggtgtgtggagcacccaggcagacccagtcctggttgggatcacacccacgggtgctactgcacgtaacactcctccttaggcctggaggccaaggtgtgggtccccacgcctgatctttgaaaacactacacagggctgctgtcacttcccagggcccaggcctcagcccaggcctcgggaccaactctttgtataacctacctgaatgtattaaaaactaattttggagaa

SEQ ID NO: 189 - DNA, 4311 bp, Homo sapiens
gtccgcagcagctctcccaggaccccactctgccagtaagtcagctgaggccgagaggagggagagaggacctcagaggccagactgtgagctagtctgccctgctcctgcgtgtgaggggtcgttggcagggcttagggaaggagaccttgatttggtatagtgggaacatttgctttggagacagatgaactggattctgatcgtgaccctgctattttctccttgtgtgactttggagccatgagaccccagatcctgctgctcctggccctgctgaccctaggcctggctgcacaacaccaagacaaagtgccctgtaagatggtggacaagaaggtctcgtgccaggttctgggcctgctccaggtcccctcggtgctcccgccagacactgagacccttgatctatctgggaaccagctgcggagtatcctggcctcacccctgggcttctacacagcacttcgtcacctggacctgagcaccaatgagatcagcttcctccagccaggagccttccaggccctgacccacctggagcacctcagcctggctcacaaccggctggcgatggccactgcgctgagtgctggtggcctgggccccctgccacgcgtgacctccctggacctgtctgggaacagcctgtacagcggcctgctggagcggctgctgggggaggcacccagcctgcataccctctcactggcggagaacagtctgactcgcctcacccgccacaccttccgggacatgcctgcgctggagcagcttgacctgcatagcaacgtgctgatggacatcgaggatggcgccttcgagggtctgccccgcctgacccatctcaacctctccaggaattccctcacctgcatctccgacttcagcctccagcagctgcgggtgctagacctgagctgcaacagcatcgaggcctttcagacggcctcccagccccaggctgagttccagctcacctggcttgacctgcgggagaacaaactgctccatttccccgacctggccgcgctcccgagactcatctacctgaacttgtccaacaacctcatccggctccccacagggccaccccaggacagcaagggcatccacgcaccttccgagggctggtcagccctgcccctctcagcccccagcgggaatgccagcggccgccccctttcccagctcttgaatctggatttgagctacaatgagattgagctcatccccgacagctttcttgagcacctgacctccctgtgcttcctgaacctcagcagaaactgcttgcggacctttgaggcccggcgcttaggctccctgccctgcctgatgctccttgacttaagccacaatgccctggagacactggaactgggcgccagagccctggggtctctgcggacgctgctcctacagggcaatgccctgcgggacctgcccccatacacctttgccaatctggccagcctgcagcggctcaacctgcaggggaaccgagtcagcccctgtggggggccagatgagcctggcccctccggctgtgtggccttctccggcatcacctccctccgcagcctgagcctggtggataatgagatagagctgctcagggcaggggccttcctccacaccccactgactgagctggacctttcttccaatcctgggctggaggtggccacgggggccttgggaggcctggaggcctccttggaggtcctggcactgcagggcaacgggctgatggtcctgcaggtggacctgccctgcttcatctgcctcaagcggctcaatcttgccgagaaccgcctgagccaccttcccgcctggacacaggctgtgtcactggaggtgctggacctgcgaaacaacagcttcagcctcctgccaggcagtgccatgggtggcctggagaccagcctccggcgcctctacctgcaggggaatccactcagctgctgcggcaatggctggctggcagcccagctgcaccagggccgtgtggacgtggacgccacccaggacctgatctgccgcttcagctcccaggaggaggtgtccctgagccacgtgcgtcctgaggactgtgagaaggggggactgaagaacatcaacctcatcatcatcctcaccttcatactggtctctgccatcctcctcaccacgctggccgcctgctgctgcgtccgccggcagaagtttaaccaacagtataaagcctaaagaagccgggagacactctaggtcagtgggggagcctgaggtacagagaagagtgaggactgactcaaggtcacacagtgatccgggatcccagaactctggtctccaaattacagcccaggacacctttctctgccgcctgctgcatcagtgggtgacccccttcccgggctgcactttgggtccagctgtggaagccagaagttgggcggtttcagggacagccgagaataatgttgacctgtcagatcaacaaatcttcactgagcatgtattttgtgccacaccctgctctgggcactgggaatgctgggaaatgagatacattcccgccctcaagaatctcccagtctggtaggagagagtgctgcagagccacgtggccgccacgcagtgtgcttagggcctgaggtgtgaaagcccagggctccagagctcggcaggccccgctggtttggtgcggtgagtcctgccccggctgtgccagggtgagggagggccaagcccaggaggatttgtctgagacatttccaagcagactgtttgtcacgtcttctgagaatgactttcagtctctctgaaaatgaaaagcttaggaccagaagagagaattggagctgtacgagtgtgtctcggatctggtgttgttaggtgggccacggcggctccagcagggtctggttaaggggtccagcccagcactggaccattccgtctcctgctctggacttgccctctcccttcctggcactctcatgttgcataccctgaccccagtgctgctctaagcaccgtccctgcccagccccacttctccatcgcagccccaccttggctgctgagccaggagctaaaaccttagatatctggttctgttttgcacccagcttggcagatgtggatttgaatccaagccttgtgtctgcccctatgtgacagctctatattttatccccgttttataaaagaggaaactgaagttctgaaaatctccttccagggccccagctaactaatgccataggtgagattcaaaccttcatccttctgtctccagggcctgatctttaccactgcaggggctgcaggccgttaagtggacaggaagtggccccacatagcccgagcagggtctggaagcatcctgtgctgtgcacacctgctctctcctctctcccaggcaggcagctgcaggcgctctcctccttctctgcctgtttccctcctcccttcctttccaccctggtgtgggttctcctgttctctctgtgctcttgcattctctcattcccttttcctctattgagcagagcctggagtttgagactatggaatccaacctccccattgcacagatggggaaactgaggcttaggaagagaatgaaacttgtggagagcttatacagagcctctgggggaaaaaagagcccttatttgtggggtgagattgggggttggaccagagtgatgtcctctctcagctatcacatcacaagataatgctggctccaaacttcctttctgtgcctcatcatgcaaggatcttttttccctcttacaaaaacaggtaaaaagcctcacccagatgacccccatccctcataccatggagtcatgagctgtctgggaagaatggacgtgctgggaccaactcaagaccttgttttgctgtcttcatcatcttacctgtgcttggcccacagtctggctcatgatgtgggctcagtaatgtgcgagaaagtgaaaatgccactctctccaccccattttacagaggagaacaccaaggcccagaggaagttaagggagagtcaatgggcagagccagggctaggccctggtggtgtgtggagcacccaggcagacccagtcctggttgggatcacacccacgggtgctactgcacgtaacactcctccttaggcctggaggccaaggtgtgggtccccacgcctgatctttgaaaacactacacagggctgctgtcacttcccagggcccaggcctcagcccaggcctcgggaccaactctttgtataacctacctgaatgtattaaaaactaattttggagaagc

SEQ ID NO: 190 - DNA, 801 bp, Homo sapiens
gtccgcagcagctctcccaggaccccactctgccagtaagtcagctgaggccgagaggagggagagaggacctcagaggccagactgtgagctagtctgccctgctcctgcgtgtgaggggtcgttggcagggcttagggaaggagaccttgatttggtatagtgggaacatttgctttggagacagatgaactggattctgatcgtgaccctgctattttctccttgtgtgactttggagccatgagaccccagatcctgctgctcctggccctgctgaccctaggcctggctgcacaacaccaagacaaagtgccctgtaagatggtggacaagaaggtctcgtgccaggttctgggcctgctccaggtcccctcggtgctcccgccagacactgagacccttgatctatctgggaaccagctgcggagtatcctggcctcacccctgggcttctacacagcacttcgtcacctggacctgagcaccaatgagatcagcttcctccagccaggagccttccaggccctgacccacctggagcacctcagcctggctcacaaccggctggcgatggccactgcgctgagtgctggtggcctgggccccctgccacgcgtgacctccctggacctgtctgggaacagcctgtacagcggcctgctggagcggctgctgggggaggcacccagcctgcataccctctcactggcggagaacagtctgactcgcctcacccgccacaccttccgggacatgcctgcgctggagcagcttgacctgcatagcaacgtgctgatg

SEQ ID NO: 191 - DNA, 2097 bp, Homo sapiens
tgagaagggcaaatgctatcattggaaaaactgacaaaagtcccaataggaaaaataaggaagtggagagttactatgtttctaatttttcatgtgcttctatttttttcctacttcagagccattgactaatagttgagtataacacaggttgtgtttccgggctgctgaaacatgacactaatattttcaaagaactgtggaagcctaaaaggaagccaatgagaaataactaaatgagagtttaggactgcagccttcattttcattcaaagatttaaaagtttccataaagtaaaatgttcttctccggccacctgttttcatagttctgtgttttccttcaggcctttctggcttcctatatggcagtaagaaaatgatgtgcttaatgattacaaatttcatatggaatacgaactttcagtttgtacatatgatgcacagagatgcttttgtggttttattggttttcatattacaaacaaagaaactagaaaatgaaaccattccaaaagtggaagtaatttctcactgcccctgtgataaactgtggtcactggctgtggcagcaactattataagatgctctgaaaactcttcagacactgaggggcaccagaggagcagactacaagaatggcacacgctatggaaaactcctggacaatcagtaaagagtaccatattgatgaagaagtgggctttgctctgccaaatccacaggaaaatctacctgatttttataatgactggatgttcattgctaaacatctgcctgatctcatagagtctggccagcttcgagaaagagttgagaagttaaacatgctcagcattgatcatctcacagaccacaagtcacagcgccttgcacgtctagttctgggatgcatcaccatggcatatgtgtggggcaaaggtcatggagatgtccgtaaggtcttgccaagaaatattgctgttccttactgccaactctccaagaaactggaactgcctcctattttggtttatgcagactgtgtcttggcaaactggaagaaaaaggatcctaataagcccctgacttatgagaacatggacgttttgttctcatttcgtgatggagactgcagtaaaggattcttcctggtctctctattggtggaaatagcagctgcttctgcaatcaaagtaattcctactgtattcaaggcaatgcaaatgcaagaacgggacactttgctaaaggcgctgttggaaatagcttcttgcttggagaaagcccttcaagtgtttcaccaaatccacgatcatgtgaacccaaaagcatttttcagtgttcttcgcatatatttgtctggctggaaaggcaacccccagctatcagacggtctggtgtatgaagggttctgggaagacccaaaggagtttgcagggggcagtgcaggccaaagcagcgtctttcagtgctttgacgtcctgctgggcatccagcagactgctggtggaggacatgctgctcagttcctccaggacatgagaagatatatgccaccagctcacaggaacttcctgtgctcattagagtcaaatccctcagtccgtgagtttgtcctttcaaaaggtgatgctggcctgcgggaagcttatgacgcctgtgtgaaagctctggtctccctgaggagctaccatctgcaaatcgtgactaagtacatcctgattcctgcaagccagcagccaaaggagaataagacctctgaagacccttcaaaactggaagccaaaggaactggaggcactgatttaatgaatttcctgaagactgtaagaagtacaactgagaaatcccttttgaaggaaggttaatgtaacccaacaagagcacattttatcatagcagagacatctgtatgcattcctgtcattacccattgtaacagagccacaaactaatactatgcaatgttttaccaataatgcaatacaaaagacctcaaaatacctgtgcatttcttgtaggaaaacaacaaaaggtaattatgtgtaattatactagaagttttgtaatctgtatcttatcattggaataaaatgacattcaataaataaaaa

SEQ ID NO: 192 - DNA, 612 bp, Homo sapiens
ttttctcctattaatctgctttgtcatttgattttcaatgaaccttcagagggcaaaaggaaagttttccctcagctccaacagttttggcccagtgaacaggacaaccaaaactgctctgctcttccgaaaattgcagtcagggaacctgggacccggcaagccagcagaaggaacacagttggagactctggttattttaccaaggctttgactgaaatgccatattttcagatgtgaccagacagctttaagaaactgaggttgatattatgaagcccataggagcttttggaaaaactggtctaatatcctaaatacacggttcacataatgggcttgtgacactgaggggcaccagaggagcagactacaagaatggcacacgctatggaaaactcctggacaatcagtaaagagtaccatattgatgaagaagtgggctttgctctgccaaatccacaggaaaatctacctgatttttataatgactggatgttcattgctaaacatctgcctgatctcatagagtctggccagcttcgagaaagagttgagaagttaaacatgctcagcattgatcatctcacagaccacaagtcacagcgcctt

SEQ ID NO: 193 - DNA, 1138 bp, Homo sapiens
gaacaggacaaccaaaactgctctgctcttccgaaaattgcagtcagggaacctgggacccggcaagccagcagaaggagccattgactaatagttgagtataacacaggttgtgtttccgggctgctgaaacatgacactaatattttcaaagaactgtggaagcctaaaaggaagccaatgagaaataactaaatgagagtttaggactgcagccttcattttcattcaaagatttaaaagtttccataaagtaaaatgttcttctccggccacctgttttcatagttctgtgttttccttcaggcctttctggcttcctatatggcagtaagaaaatgatgtgcttaatgattacaaatttcatatggaatacgaactttcagtttgtacatatgatgcacagagatgcttttgtggttttattggttttcatattacaaacaaagaaactagaaaatgaaaccattccaaaagtggaagtaatttctcactgcccctgtgataaactgtggtcactggctgtggcagcaactattataagatgctctgaaaactcttcagacactgaggggcaccagaggagcagactacaagaatggcacacgctatggaaaactcctggacaatcagtaaagagtaccatattgatgaagaagtgggctttgctctgccaaatccacaggaaaatctacctgatttttataatgactggatgttcattgctaaacatctgcctgatctcatagagtctggccagcttcgagaaagagttgagaagttaaacatgctcagcattgatcatctcacagaccacaagtcacagcgccttgcacgtctagttctgggatgcatcaccatggcatatgtgtggggcaaaggtcatggagatgtccgtaaggtcttgccaagaaatattgctgttccttactgccaactctccaagaaactggaactgcctcctattttggtttatgcagactgtgtcttggcaaactggaagaaaaaggatcctaataagcccctgacttatgagaacatggacgttttgttctcatttcgtgatggagactgcagtaaaggattcttcctggtctctctattggtggaaatagcagctgcttctgcaatcaaagta

SEQ ID NO: 194 - DNA, 1709 bp, Homo sapiens
aggacaaccaaaactgctctgctcttccgaaaattgcagtcagggaacctgggacccggcaagccagcagaaggaggaacgggcaacttggtttcttctttagcttccttgttctcattaagattgaacaatgcctctaaagtgaaccacagacttgcatgcaagctgaaaacctttaccaaatgcagtcttaatttgtactttgagaaaaacattttcaagacactgaggggcaccagaggagcagactacaagaatggcacacgctatggaaaactcctggacaatcagtaaagagtaccatattgatgaagaagtgggctttgctctgccaaatccacaggaaaatctacctgatttttataatgactggatgttcattgctaaacatctgcctgatctcatagagtctggccagcttcgagaaagagttgagaagttaaacatgctcagcattgatcatctcacagaccacaagtcacagcgccttgcacgtctagttctgggatgcatcaccatggcatatgtgtggggcaaaggtcatggagatgtccgtaaggtcttgccaagaaatattgctgttccttactgccaactctccaagaaactggaactgcctcctattttggtttatgcagactgtgtcttggcaaactggaagaaaaaggatcctaataagcccctgacttatgagaacatggacgttttgttctcatttcgtgatggagactgcagtaaaggattcttcctggtctctctattggtggaaatagcagctgcttctgcaatcaaagtaattcctactgtattcaaggcaatgcaaatgcaagaacgggacactttgctaaaggcgctgttggaaatagcttcttgcttggagaaagcccttcaagtgtttcaccaaatccacgatcatgtgaacccaaaagcatttttcagtgttcttcgcatatatttgtctggctggaaaggcaacccccagctatcagacggtctggtgtatgaagggttctgggaagacccaaaggagtttgcagggggcagtgcaggccaaagcagcgtctttcagtgctttgacgtcctgctgggcatccagcagactgctggtggaggacatgctgctcagttcctccaggacatgagaagatatatgccaccagctcacaggaacttcctgtgctcattagagtcaaatccctcagtccgtgagtttgtcctttcaaaaggtgatgctggcctgcgggaagcttatgacgcctgtgtgaaagctctggtctccctgaggagctaccatctgcaaatcgtgactaagtacatcctgattcctgcaagccagcagccaaaggagaataagacctctgaagacccttcaaaactggaagccaaaggaactggaggcactgatttaatgaatttcctgaagactgtaagaagtacaactgagaaatcccttttgaaggaaggttaatgtaacccaacaagagcacattttatcatagcagagacatctgtatgcattcctgtcattacccattgtaacagagccacaaactaatactatgcaatgttttaccaataatgcaatacaaaagacctcaaaatacctgtgcatttcttgtaggaaaacaacaaaaggtaattatgtgtaattatactagaagttttgtaatctgtatcttatcattggaataaaatgacattcaataaat

SEQ ID NO: 195 - DNA, 572 bp, Homo sapiens
aaccaaaactgctctgctcttccgaaaattgcagtcagggaacctgggacccggcaagccagcagaaggagttaaggaaaatgtttgttctgttaagctttacagaaatggaacacagttggagactctggttattttaccaaggctttgactgaaatgccatattttcagatgtgaccagacagctttaagaaactgaggttgatattatgaagcccataggagcttttggaaaaactggtctaatatcctaaatacacggttcacataatgggcttgtgaaactagaaaatgaaaccattccaaaagtggaagtaatttctcactgcccctgtgataaactgtggtcactggctgtggcagcaactattataagatgctctgaaaactcttcagacactgaggggcaccagaggagcagactacaagaatggcacacgctatggaaaactcctggacaatcagtaaagagtaccatattgatgaagaagtgggctttgctctgccaaatccacaggaaaatctacctgatttttataatgactggatgttcattgctaaacatctgcctg

SEQ ID NO: 196 - DNA, 1227 bp, Homo sapiens
atggagccccacagaccgaatgtgaagacagcagtgccattgtctttggaaagctatcacatatctgaagagtatggctttcttcttccagattctctgaaagaacttccagatcattataggccttggatggaaattgccaacaaacttcctcaattgattgatgctcaccagcttcaagctcatgtggacaagatgcccctgctgagctgccagttcctgaagggtcaccgggagcagcgcctggcccacctggtcctgagcttcctcaccatgggttatgtctggcaggaaggagaggcgcagcctgcagaggtcctgccaaggaatcttgcccttccatttgtcgaagtctccaggaacttggggctccctcctatcctggtccactcagacttggtgctgacgaactggaccaaaaaagatccagacggattcctggaaattgggaacctggagaccatcatctcatttcctgggggagagagcctgcatggttttatactggtgactgctttggtagagaaagaagcagtgcctgggataaaggctcttgttcaggccacgaatgctatcttgcagcccaaccaggaggccctgctccaagccctgcagcgactgagactgtctattcaggacatcaccaaaaccttaggacagatgcatgattatgtagatccagacatattttatgcaggcatccggatctttctctctggatggaaagacaacccagcaatgcctgcagggctgatgtatgaaggagtttcccaagagcccctgaaatactccggcgggagtgcagctcagagcacagtgcttcatgcctttgatgagttcttaggcattcgtcatagcaaggaaagtggtgactttctgtacagaatgagggattacatgcctccttcccataaggccttcatagaagacatccactcagcaccttccctgagggactacatcctgtcatctggacaggaccacttgctgacagcttataaccagtgtgtgcaggccctggcagagctgcggagctatcacatcaccatggtcaccaaatacctcatcacagctgcagccaaggcaaagcatgggaagccaaaccatctcccagggcctcctcaggctttaaaagacaggggcacaggtggaaccgcagttatgagctttcttaagagtgtcagggataagaccttggagtcaatccttcacccacgtggttaggag

SEQ ID NO: 197 - DNA, 2294 bp, Homo sapiens
agtccagatgatagttaagaaagcagtaagaatacagagagtccacaatgagatgaaaatgcactgccagttgaaacatcctcctacactggagctttataaatattttaaagacaaggattggattagatttgacattagaaatgtaccataatacagaaggcaatggacacctaaagaacagaatgaaaaccttcttaggaaatgaagcttgacacttcacccaccaggccaccacaagaatgttgcattttcattattatgatacttcaaacaaaataatggagccccacagaccgaatgtgaagacagcagtgccattgtctttggaaagctatcacatatctgaagagtatggctttcttcttccagattctctgaaagaacttccagatcattataggccttggatggaaattgccaacaaacttcctcaattgattgatgctcaccagcttcaagctcatgtggacaagatgcccctgctgagctgccagttcctgaagggtcaccgggagcagcgcctggcccacctggtcctgagcttcctcaccatgggttatgtctggcaggaaggagaggcgcagcctgcagaggtcctgccaaggaatcttgcccttccatttgtcgaagtctccaggaacttggggctccctcctatcctggtccactcagacttggtgctgacgaactggaccaaaaaagatccagacggattcctggaaattgggaacctggagaccatcatctcatttcctgggggagagagcctgcatggttttatactggtgactgctttggtagagaaagaagcagtgcctgggataaaggctcttgttcaggccacgaatgctatcttgcagcccaaccaggaggccctgctccaagccctgcagcgactgagactgtctattcaggacatcaccaaaaccttaggacagatgcatgattatgtagatccagacatattttatgcaggcatccggatctttctctctggatggaaagacaacccagcaatgcctgcagggctgatgtatgaaggagtttcccaagagcccctgaaatactccggcgggagtgcagctcagagcacagtgcttcatgcctttgatgagttcttaggcattcgtcatagcaaggaaagtggtgactttctgtacagaatgagggattacatgcctccttcccataaggccttcatagaagacatccactcagcaccttccctgagggactacatcctgtcatctggacaggaccacttgctgacagcttataaccagtgtgtgcaggccctggcagagctgcggagctatcacatcaccatggtcaccaaatacctcatcacagctgcagccaaggcaaagcatgggaagccaaaccatctcccagggcctcctcaggctttaaaagacaggggcacaggtggaaccgcagttatgagctttcttaagagtgtcagggataagaccttggagtcaatccttcacccacgtggttaggaggctgccctctccccagcaatgcagagcccccatggagggcaggtgggcctggagaatgagggtcagggttctgcctgggatcatccaggaaggatctcagccctattcatgtttctgctctacagagcactatattctccttgttgagagctgttggcttcacaaaggagagttgatgtggccaagcctttccctccctacctgatcactgcttaacggcatgtataatggatacttcctcatgcagaacccccagaggagtgactgtatgccattctctttgccaagtaatagaaaaccaatctaaatgtcaaaaatcagataaaattgcctggggatacattacttgttgattttcttaaaaaacaaattcacttaacaattcattaagttcatactgagcactgcctccaagattaaaaccaggatttctgtggtcccagaccagccctcttctccctgaatgtgttgagttggtggcaggaggttggaaatgctccagtggagatgggaagatagaggatgctgacaataaggacttggaagtcactagtgtgaaaatgagcagttaatgatatgggaacggatgagactttccacgtggtacctagatttgcaaattctattgtaatgcctttatttttagaagaattattctctcttcttactctgaaaatctgtatttgtaaaatgaatgaatggatcctatataagtaaataagaaaactgggaataagtagtaaatcaatgtgtttagtgtgcaaataaatgtaaatgcttttattg

SEQ ID NO: 198 - DNA, 1630 bp, Homo sapiens
acacatcaggggcttgctcttgcaaaaccaaaccacaagacagacttgcaaaagaaggcatgcacagctcagcactgctctgttgcctggtcctcctgactggggtgagggccagcccaggccagggcacccagtctgagaacagctgcacccacttcccaggcaacctgcctaacatgcttcgagatctccgagatgccttcagcagagtgaagactttctttcaaatgaaggatcagctggacaacttgttgttaaaggagtccttgctggaggactttaagggttacctgggttgccaagccttgtctgagatgatccagttttacctggaggaggtgatgccccaagctgagaaccaagacccagacatcaaggcgcatgtgaactccctgggggagaacctgaagaccctcaggctgaggctacggcgctgtcatcgatttcttccctgtgaaaacaagagcaaggccgtggagcaggtgaagaatgcctttaataagctccaagagaaaggcatctacaaagccatgagtgagtttgacatcttcatcaactacatagaagcctacatgacaatgaagatacgaaactgagacatcagggtggcgactctatagactctaggacataaattagaggtctccaaaatcggatctggggctctgggatagctgacccagccccttgagaaaccttattgtacctctcttatagaatatttattacctctgatacctcaacccccatttctatttatttactgagcttctctgtgaacgatttagaaagaagcccaatattataatttttttcaatatttattattttcacctgtttttaagctgtttccatagggtgacacactatggtatttgagtgttttaagataaattataagttacataagggaggaaaaaaaatgttctttggggagccaacagaagcttccattccaagcctgaccacgctttctagctgttgagctgttttccctgacctccctctaatttatcttgtctctgggcttggggcttcctaactgctacaaatactcttaggaagagaaaccagggagcccctttgatgattaattcaccttccagtgtctcggagggattcccctaacctcattccccaaccacttcattcttgaaagctgtggccagcttgttatttataacaacctaaatttggttctaggccgggcgcggtggctcacgcctgtaatcccagcactttgggaggctgaggcgggtggatcacttgaggtcaggagttcctaaccagcctggtcaacatggtgaaaccccgtctctactaaaaatacaaaaattagccgggcatggtggcgcgcacctgtaatcccagctacttgggaggctgaggcaagagaattgcttgaacccaggagatggaagttgcagtgagctgatatcatgcccctgtactccagcctgggtgacagagcaagactctgtctcaaaaaataaaaataaaaataaatttggttctaatagaactcagttttaactagaatttattcaattcctctgggaatgttacattgtttgtctgtcttcatagcagattttaattttgaataaataaatgtatcttattcacatca

SEQ ID NO: 199 - DNA, 1522 bp, Homo sapiens
acggggcgtccggctaaggccggggacccagggtggtgggcggggtgtcccgcccgcctgtggaccccgcgcagtaactgcgaacatttcgctttcattttgggccgagctggaggcggcggggccgtcccggaacggctgcggccgggcaccccgggagttaatccgaaagcgccgcaagccccgcgggccggccgcaccgcacgtgtcaccgagaagctgatgtagagagagacacagaaggagacagaaagcaagagaccagagtcccgggaaagtcctgccgcgcctcgggacaattataaaaatgtggccccctgggtcagcctcccagccaccgccctcacctgccgcggccacaggtctgcatccagcggctcgccctgtgtccctgcagtgccggctcagcatgtgtccagcgcgcagcctcctccttgtggctaccctggtcctcctggaccacctcagtttggccagaaacctccccgtggccactccagacccaggaatgttcccatgccttcaccactcccaaaacctgctgagggccgtcagcaacatgctccagaaggccagacaaactctagaattttacccttgcacttctgaagagattgatcatgaagatatcacaaaagataaaaccagcacagtggaggcctgtttaccattggaattaaccaagaatgagagttgcctaaattccagagagacctctttcataactaatgggagttgcctggcctccagaaagacctcttttatgatggccctgtgccttagtagtatttatgaagacttgaagatgtaccaggtggagttcaagaccatgaatgcaaagcttctgatggatcctaagaggcagatctttctagatcaaaacatgctggcagttattgatgagctgatgcaggccctgaatttcaacagtgagactgtgccacaaaaatcctcccttgaagaaccggatttttataaaactaaaatcaagctctgcatacttcttcatgctttcagaattcgggcagtgactattgatagagtgatgagctatctgaatgcttcctaaaaagcgaggtccctccaaaccgttgtcatttttataaaactttgaaatgaggaaactttgataggatgtggattaagaactagggagggggaaagaaggatgggactattacatccacatgatacctctgatcaagtatttttgacatttactgtggataaattgtttttaagttttcatgaatgaattgctaagaagggaaaatatccatcctgaaggtgtttttcattcactttaatagaagggcaaatatttataagctatttctgtaccaaagtgtttgtggaaacaaacatgtaagcataacttattttaaaatatttatttatataacttggtaatcatgaaagcatctgagctaacttatatttatttatgttatatttattaaattatttatcaagtgtatttgaaaaatatttttaagtgttctaaaaataaaagtattgaatt

SEQ ID NO: 200 - DNA, 1283 bp, Homo sapiens
cgtgtcaccgagaagctgatgtagagagagacacagaaggagacagaaagcaagagaccagagtcccgggaaagtcctgccgcgcctcgggacaattataaaaatgtggccccctgggtcagcctcccagccaccgccctcacctgccgcggccacaggtctgcatccagcggctcgccctgtgtccctgcagtgccggctcagcatgtgtccagcgcgcagcctcctccttgtggctaccctggtcctcctggaccacctcagtttggccagaaacctccccgtggccactccagacccaggaatgttcccatgccttcaccactcccaaaacctgctgagggccgtcagcaacatgctccagaaggccagacaaactctagaattttacccttgcacttctgaagagattgatcatgaagatatcacaaaagataaaaccagcacagtggaggcctgtttaccattggaattaaccaagaatgggagttgcctggcctccagaaagacctcttttatgatggccctgtgccttagtagtatttatgaagacttgaagatgtaccaggtggagttcaagaccatgaatgcaaagcttctgatggatcctaagaggcagatctttctagatcaaaacatgctggcagttattgatgagctgatgcaggccctgaatttcaacagtgagactgtgccacaaaaatcctcccttgaagaaccggatttttataaaactaaaatcaagctctgcatacttcttcatgctttcagaattcgggcagtgactattgatagagtgatgagctatctgaatgcttcctaaaaagcgaggtccctccaaaccgttgtcatttttataaaactttgaaatgaggaaactttgataggatgtggattaagaactagggagggggaaagaaggatgggactattacatccacatgatacctctgatcaagtatttttgacatttactgtggataaattgtttttaagttttcatgaatgaattgctaagaagggaaaatatccatcctgaaggtgtttttcattcactttaatagaagggcaaatatttataagctatttctgtaccaaagtgtttgtggaaacaaacatgtaagcataacttattttaaaatatttatttatataacttggtaatcatgaaagcatctgagctaacttatatttatttatgttatatttattaaattatttatcaagtgtatttgaaaaatatttttaagtgttctaaaaataaaagtattgaattaaagtga

SEQ ID NO: 201 - DNA, 863 bp, Homo sapiens
cgtgtcaccgagaagctgatgtagagagagacacagaaggagacagaaagcaagagaccagagtcccgggaaagtcctgccgcgcctcgggacaattataaaaatgtggccccctgggtcagcctcccagccaccgccctcacctgccgcggccacaggtctgcatccagcggctcgccctgtgtccctgcagtgccggctcagcatgtgtccagcgcgcagcctcctccttgtggctaccctggtcctcctggaccacctcagtttggccagaaacctccccgtggccactccagacccaggaatgttcccatgccttcaccactcccaaaacctgctgagggccgtcagcaacatgctccagaagaatgagagttgcctaaattccagagagacctctttcataactaatgggagttgcctggcctccagaaagacctcttttatgatggccctgtgccttagtagtatttatgaagacttgaagatgtaccaggtggagttcaagaccatgaatgcaaagcttctgatggatcctaagaggcagatctttctagatcaaaacatgctggcagttattgatgagctgatgcaggccctgaatttcaacagtgagactgtgccacaaaaatcctcccttgaagaaccggatttttataaaactaaaatcaagctctgcatacttcttcatgctttcagaattcgggcagtgactattgatagagtgatgagctatctgaatgcttcctaaaaagcgaggtccctccaaaccgttgtcatttttataaaactttgaaatgaggaaactttgataggatgtggattaagaactagggagggggaaagaaggatgggactattac

SEQ ID NO: 202 - DNA, 1128 bp, Homo sapiens
ccgcagccatgaccccgcagcttctcctggcccttgtcctctgggccagctgcccgccctgcagtggaaggaaagggcccccagcagctctgacactgccccgggtgcaatgccgagcctctcggtacccgatcgccgtggattgctcctggaccctgccgcctgctccaaactccaccagccccgtgtccttcattgccacgtacaggctcggcatggctgcccggggccacagctggccctgcctgcagcagacgccaacgtccaccagctgcaccatcacggatgtccagctgttctccatggctccctacgtgctcaatgtcaccgccgtccacccctggggctccagcagcagcttcgtgcctttcataacagagcacatcatcaagcccgaccctccagaaggcgtgcgcctaagccccctcgctgagcgccagctacaggtgcagtgggagcctcccgggtcctggcccttcccagagatcttctcactgaagtactggatccgttacaagcgtcagggagctgcgcgcttccaccgggtggggcccattgaagccacgtccttcatcctcagggctgtgcggccccgagccaggtactacgtccaagtggcggctcaggacctcacagactacggggaactgagtgactggagtctccccgccactgccacaatgagcctgggcaagtagcaagggcttcccgctgcctccagacagcacctgggtcctcgccaccctaagccccgggacacctgttggagggcggatgggatctgcctagcctgggctggagtccttgctttgctgctgctgagctgccgggcaacctcagatgaccgacttttccctttgagcctcagtttctctagctgagaaatggagatgtactactctctcctttacctttacctttaccacagtgcagggctgactgaactgtcactgtgagatattttttattgtttaattagaaaagaattgttgttgggctgggcgcagtggatcgcacctgtaatcccagtcactgggaagccgacgtgggagggtagcttgaggccaggagctcgaaaccagtccgggccacacagcaagaccccatctctaaaaaattaatataaat

SEQ ID NO: 203 - DNA, 772 bp, Homo sapiens
cttcattccattttctgttgagtaataaactcaacgttgaaaatgtcctttgtgggggagaactcaggagtgaaaatgggctctgaggactgggaaaaagatgaaccccagtgctgcttagaagacccggctggaagccccctggaaccaggcccaagcctccccaccatgaattttgttcacacaagtccaaaggtgaagaacttaaacccgaagaaattcagcattcatgaccaggatcacaaagtactggtcctggactctgggaatctcatagcagttccagataaaaactacatacgcccagagatcttctttgcattagcctcatccttgagctcagcctctgcggagaaaggaagtccgattctcctgggggtctctaaaggggagttttgtctctactgtgacaaggataaaggacaaagtcatccatcccttcagctgaagaaggagaaactgatgaagctggctgcccaaaaggaatcagcacgccggcccttcatcttttatagggctcaggtgggctcctggaacatgctggagtcggcggctcaccccggatggttcatctgcacctcctgcaattgtaatgagcctgttggggtgacagataaatttgagaacaggaaacacattgaattttcatttcaaccagtttgcaaagctgaaatgagccccagtgaggtcagcgattaggaaactgccccattgaacgccttcctcgctaatttgaactaattgtataaaaacaccaaacctgctcactaaa

SEQ ID NO: 204 - DNA, 652 bp, Homo sapiens
atgtcaggctgtgataggagggaaacagaaaccaaaggaaagaacagctttaagaagcgcttaagaggtccaaaggtgaagaacttaaacccgaagaaattcagcattcatgaccaggatcacaaagtactggtcctggactctgggaatctcatagcagttccagataaaaactacatacgcccagagatcttctttgcattagcctcatccttgagctcagcctctgcggagaaaggaagtccgattctcctgggggtctctaaaggggagttttgtctctactgtgacaaggataaaggacaaagtcatccatcccttcagctgaagaaggagaaactgatgaagctggctgcccaaaaggaatcagcacgccggcccttcatcttttatagggctcaggtgggctcctggaacatgctggagtcggcggctcaccccggatggttcatctgcacctcctgcaattgtaatgagcctgttggggtgacagataaatttgagaacaggaaacacattgaattttcatttcaaccagtttgcaaagctgaaatgagccccagtgaggtcagcgattaggaaactgccccattgaacgccttcctcgctaatttgaactaattgtataaaaacaccaaacctgctcactaaa

SEQ ID NO: 205 - DNA, 589 bp, Homo sapiens
cttcattccattttctgttgagtaataaactcaacgttgaaaatgtcctttgtgggggagaactcaggagtgaaaatgggctctgaggactgggaaaaagatgaaccccagtgctgcttagaagagatcttctttgcattagcctcatccttgagctcagcctctgcggagaaaggaagtccgattctcctgggggtctctaaaggggagttttgtctctactgtgacaaggataaaggacaaagtcatccatcccttcagctgaagaaggagaaactgatgaagctggctgcccaaaaggaatcagcacgccggcccttcatcttttatagggctcaggtgggctcctggaacatgctggagtcggcggctcaccccggatggttcatctgcacctcctgcaattgtaatgagcctgttggggtgacagataaatttgagaacaggaaacacattgaattttcatttcaaccagtttgcaaagctgaaatgagccccagtgaggtcagcgattaggaaactgccccattgaacgccttcctcgctaatttgaactaattgtataaaaacaccaaacctgctcactaaa

SEQ ID NO: 206 - DNA, 709 bp, Homo sapiens
cttcattccattttctgttgagtaataaactcaacgttgaaaatgtcctttgtgggggagaactcaggagtgaaaatgggctctgaggactgggaaaaagatgaaccccagtgctgcttagaaggtccaaaggtgaagaacttaaacccgaagaaattcagcattcatgaccaggatcacaaagtactggtcctggactctgggaatctcatagcagttccagataaaaactacatacgcccagagatcttctttgcattagcctcatccttgagctcagcctctgcggagaaaggaagtccgattctcctgggggtctctaaaggggagttttgtctctactgtgacaaggataaaggacaaagtcatccatcccttcagctgaagaaggagaaactgatgaagctggctgcccaaaaggaatcagcacgccggcccttcatcttttatagggctcaggtgggctcctggaacatgctggagtcggcggctcaccccggatggttcatctgcacctcctgcaattgtaatgagcctgttggggtgacagataaatttgagaacaggaaacacattgaattttcatttcaaccagtttgcaaagctgaaatgagccccagtgaggtcagcgattaggaaactgccccattgaacgccttcctcgctaatttgaactaattgtataaaaacaccaaacctgctcactaaa

SEQ ID NO: 207 - DNA, 652 bp, Homo sapiens
cttcattccattttctgttgagtaataaactcaacgttgaaaatgtcctttgtgggggagaactcaggagtgaaaatgggctctgaggactgggaaaaagatgaaccccagtgctgcttagaagacccggctggaagccccctggaaccaggcccaagcctccccaccatgaattttgttcacacaaagatcttctttgcattagcctcatccttgagctcagcctctgcggagaaaggaagtccgattctcctgggggtctctaaaggggagttttgtctctactgtgacaaggataaaggacaaagtcatccatcccttcagctgaagaaggagaaactgatgaagctggctgcccaaaaggaatcagcacgccggcccttcatcttttatagggctcaggtgggctcctggaacatgctggagtcggcggctcaccccggatggttcatctgcacctcctgcaattgtaatgagcctgttggggtgacagataaatttgagaacaggaaacacattgaattttcatttcaaccagtttgcaaagctgaaatgagccccagtgaggtcagcgattaggaaactgccccattgaacgccttcctcgctaatttgaactaattgtataaaaacaccaaacctgctcactaaa

SEQ ID NO: 208 - DNA, 1761 bp, Homo sapiens
catccatctgcacagctggggcccctgggaggagacgccatgatccccaccttcacggctctgctctgcctcgggctgagtctgggccccaggacccacatgcaggcagggcccctccccaaacccaccctctgggctgagccaggctctgtgatcagctgggggaactctgtgaccatctggtgtcaggggaccctggaggctcgggagtaccgtctggataaagaggaaagcccagcaccctgggacagacagaacccactggagcccaagaacaaggccagattctccatcccatccatgacagaggactatgcagggagataccgctgttactatcgcagccctgtaggctggtcacagcccagtgaccccctggagctggtgatgacaggagcctacagtaaacccaccctttcagccctgccgagtcctcttgtgacctcaggaaagagcgtgaccctgctgtgtcagtcacggagcccaatggacactttccttctgatcaaggagcgggcagcccatcccctactgcatctgagatcagagcacggagctcagcagcaccaggctgaattccccatgagtcctgtgacctcagtgcacggggggacctacaggtgcttcagctcacacggcttctcccactacctgctgtcacaccccagtgaccccctggagctcatagtctcaggatccttggaggatcccaggccctcacccacaaggtccgtctcaacagctgcaggccctgaggaccagcccctcatgcctacagggtcagtcccccacagtggtctgagaaggcactgggaggtactgatcggggtcttggtggtctccatcctgcttctctccctcctcctcttcctcctcctccaacactggcgtcagggaaaacacaggacattggcccagagacaggctgatttccaacgtcctccaggggctgccgagccagagcccaaggacgggggcctacagaggaggtccagcccagctgctgacgtccagggagaaaacttctgtgctgccgtgaagaacacacagcctgaggacggggtggaaatggacactcggagcccacacgatgaagacccccaggcagtgacgtatgccaaggtgaaacactccagacctaggagagaaatggcctctcctccctccccactgtctggggaattcctggacacaaaggacagacaggcagaagaggacagacagatggacactgaggctgctgcatctgaagccccccaggatgtgacctacgcccagctgcacagctttaccctcagacagaaggcaactgagcctcctccatcccaggaaggggcctctccagctgagcccagtgtctatgccactctggccatccactaatccaggggggacccagaccccacaagccatggagactcaggaccccagaaggcatggaagctgcctccagtagacatcactgaaccccagccagcccagacccctgacacagaccactagaagattccgggaacgttgggagtcacctgattctgcaaagataaataatatccctgcattatcaaaataaagtagcagacctctcaattcacaatgagttaactgataaaacaaaacagaagtcagacaatgttttaaattgaatgatcatgtaaatattacacatcaaaccaatgacatgggaaaatgggagcttctaatgaggacaaacaaaaaatagagaaaaattaataaagtcaaaatgtttattcttgaaaa

SEQ ID NO: 209 - DNA, 1347 bp, Homo sapiens
atgatccccaccttcacggctctgctctgcctcgggctgagtctgggccccaggacccacatgcaggcagggcccctccccaaacccaccctctgggctgagccaggctctgtgatcagctgggggaactctgtgaccatctggtgtcaggggaccctggaggctcgggagtaccgtctggataaagaggaaagcccagcaccctgggacagacagaacccactggagcccaagaacaaggccagattctccatcccatccatgacagaggactatgcagggagataccgctgttactatcgcagccctgtaggctggtcacagcccagtgaccccctggagctggtgatgacaggagcctacagtaaacccaccctttcagccctgccgagtcctcttgtgacctcaggaaagagcgtgaccctgctgtgtcagtcacggagcccaatggacactttccttctgatcaaggagcgggcagcccatcccctactgcatctgagatcagagcacggagctcagcagcaccaggctgaattccccatgagtcctgtgacctcagtgcacggggggacctacaggtgcttcagctcacacggcttctcccactacctgctgtcacaccccagtgaccccctggagctcatagtctcaggatccttggaggatcccaggccctcacccacaaggtccgtctcaacagctgcaggccctgaggaccagcccctcatgcctacagggtcagtcccccacagtggtctgagaaggcactgggaggtactgatcggggtcttggtggtctccatcctgcttctctccctcctcctcttcctcctcctccaacactggcgtcagggaaaacacaggacattggcccagagacaggctgatttccaacgtcctccaggggctgccgagccagagcccaaggacgggggcctacagaggaggtccagcccagctgctgacgtccagggagaaaacttctgtgctgccgtgaagaacacacagcctgaggacggggtggaaatggacactcggcagagcccacacgatgaagacccccaggcagtgacgtatgccaaggtgaaacactccagacctaggagagaaatggcctctcctccctccccactgtctggggaattcctggacacaaaggacagacaggcagaagaggacagacagatggacactgaggctgctgcatctgaagccccccaggatgtgacctacgcccagctgcacagctttaccctcagacagaaggcaactgagcctcctccatcccaggaaggggcctctccagctgagcccagtgtctatgccactctggccatccactaa

SEQ ID NO: 210 - DNA, 1225 bp, Homo sapiens
agctgcacggctcctggccccggagcatgcgcgagagccgccccggagcgccccggagccccccgccgtcccgcccgcggcgtcccgcgccccgccgccagcgcacccccggacgctatggcccacccctccggctggccccttctgtaggatggtagcacacaaccaggtggcagccgacaatgcagtctccacagcagcagagccccgacggcggccagaaccttcctcctcttcctcctcctcgcccgcggcccccgcgcgcccgcggccgtgccccgcggtcccggccccggcccccggcgacacgcacttccgcacattccgttcgcacgccgattaccggcgcatcacgcgcgccagcgcgctcctggacgcctgcggattctactgggggcccctgagcgtgcacggggcgcacgagcggctgcgcgccgagcccgtgggcaccttcctggtgcgcgacagccgccagcggaactgctttttcgcccttagcgtgaagatggcctcgggacccacgagcatccgcgtgcactttcaggccggccgctttcacctggatggcagccgcgagagcttcgactgcctcttcgagctgctggagcactacgtggcggcgccgcgccgcatgctgggggccccgctgcgccagcgccgcgtgcggccgctgcaggagctgtgccgccagcgcatcgtggccaccgtgggccgcgagaacctggctcgcatccccctcaaccccgtcctccgcgactacctgagctccttccccttccagatttgaccggcagcgcccgccgtgcacgcagcattaactgggatgccgtgttattttgttattacttgcctggaaccatgtgggtaccctccccggcctgggttggagggagcggatgggtgtaggggcgaggcgcctcccgccctcggctggagacgaggccgcagaccccttctcacctcttgagggggtcctccccctcctggtgctccctctgggtccccctggttgttgtagcagcttaactgtatctggagccaggacctgaactcgcacctcctacctcttcatgtttacatatacccagtatctttgcacaaaccaggggttgggggagggtctctggctttatttttctgctgtgcagaatcctattttatattttttaaagtcagtttaggtaataaactttattatgaaagttttttttttaaaaaaaaataa

SEQ ID NO: 211 - DNA, 636 bp, Homo sapiens
atggtagcacacaaccaggtggcagccgacaatgcagtctccacagcagcagagccccgacggcggccagaaccttcctcctcttcctcctcctcgcccgcggcccccgcgcgcccgcggccgtgccccgcggtcccggccccggcccccggcgacacgcacttccgcacattccgttcgcacgccgattaccggcgcatcacgcgcgccagcgcgctcctggacgcctgcggattctactgggggcccctgagcgtgcacggggcgcacgagcggctgcgcgccgagcccgtgggcaccttcctggtgcgcgacagccgccagcggaactgctttttcgcccttagcgtgaagatggcctcgggacccacgagcatccgcgtgcactttcaggccggccgctttcacctggatggcagccgcgagagcttcgactgcctcttcgagctgctggagcactacgtggcggcgccgcgccgcatgctgggggccccgctgcgccagcgccgcgtgcggccgctgcaggagctgtgccgccagcgcatcgtggccaccgtgggccgcgagaacctggctcgcatccccctcaaccccgtcctccgcgactacctgagctccttccccttccagatttga

SEQ ID NO: 212 - DNA, 2199 bp, Homo sapiens
ccccgccgccgccgcccttcgcgccctgggccatctccctcccacctccctccgcggagcagccagacagcgagggccccggccgggggcaggggggacgccccgtccggggcacccccccggctctgagccgcccgcggggccggcctcggcccggagcggaggaaggagtcgccgaggagcagcctgaggccccagagtctgagacgagccgccgccgcccccgccactgcggggaggagggggaggaggagcgggaggagggacgagctggtcgggagaagaggaaaaaaacttttgagacttttccgttgccgctgggagccggaggcgcggggacctcttggcgcgacgctgccccgcgaggaggcaggacttggggaccccagaccgcctccctttgccgccggggacgcttgctccctccctgccccctacacggcgtccctcaggcgcccccattccggaccagccctcgggagtcgccgacccggcctcccgcaaagacttttccccagacctcgggcgcaccccctgcacgccgccttcatccccggcctgtctcctgagcccccgcgcatcctagaccctttctcctccaggagacggatctctctccgacctgccacagatcccctattcaagaccacccaccttctggtaccagatcgcgcccatctaggttatttccgtgggatactgagacacccccggtccaagcctcccctccaccactgcgcccttctccctgaggacctcagctttccctcgaggccctcctaccttttgccgggagacccccagcccctgcaggggcggggcctccccaccacaccagccctgttcgcgctctcggcagtgccggggggcgccgcctcccccatgccgccctccgggctgcggctgctgccgctgctgctaccgctgctgtggctactggtgctgacgcctggccggccggccgcgggactatccacctgcaagactatcgacatggagctggtgaagcggaagcgcatcgaggccatccgcggccagatcctgtccaagctgcggctcgccagccccccgagccagggggaggtgccgcccggcccgctgcccgaggccgtgctcgccctgtacaacagcacccgcgaccgggtggccggggagagtgcagaaccggagcccgagcctgaggccgactactacgccaaggaggtcacccgcgtgctaatggtggaaacccacaacgaaatctatgacaagttcaagcagagtacacacagcatatatatgttcttcaacacatcagagctccgagaagcggtacctgaacccgtgttgctctcccgggcagagctgcgtctgctgaggctcaagttaaaagtggagcagcacgtggagctgtaccagaaatacagcaacaattcctggcgatacctcagcaaccggctgctggcacccagcgactcgccagagtggttatcttttgatgtcaccggagttgtgcggcagtggttgagccgtggaggggaaattgagggctttcgccttagcgcccactgctcctgtgacagcagggataacacactgcaagtggacatcaacgggttcactaccggccgccgaggtgacctggccaccattcatggcatgaaccggcctttcctgcttctcatggccaccccgctggagagggcccagcatctgcaaagctcccggcaccgccgagccctggacaccaactattgcttcagctccacggagaagaactgctgcgtgcggcagctgtacattgacttccgcaaggacctcggctggaagtggatccacgagcccaagggctaccatgccaacttctgcctcgggccctgcccctacatttggagcctggacacgcagtacagcaaggtcctggccctgtacaaccagcataacccgggcgcctcggcggcgccgtgctgcgtgccgcaggcgctggagccgctgcccatcgtgtactacgtgggccgcaagcccaaggtggagcagctgtccaacatgatcgtgcgctcctgcaagtgcagctgaggtcccgccccgccccgccccgccccggcaggcccggccccaccccgccccgcccccgctgccttgcccatgggggctgtatttaaggacacccgtgccccaagcccacctggggccccattaaagatggagagaggactgcgg

SEQ ID NO: 213 - DNA, 534 bp, Artificial Sequence
  Description of Artificial Sequence: Synthetic Transcript Sequence
atgcacagcagcgccctgctgtgctgcctggtgctgctgaccggcgtgcgcgccagccccggccagggcacccagagcgagaacagctgcacccacttccccggcaacctgcccaacatgctgcgcgacctgcgcgacgccttcagccgcgtgaagaccttcttccagatgaaggaccagctggacaacctgctgctgaaggagagcctgctggaggacttcaagggctacctgggctgccaggccctgagcgagatgatccagttctacctggaggaggtgatgccccaggccgagaaccaggaccccgacatcaaggcccacgtgaacagcctgggcgagaacctgaagaccctgcgcctgcgcctgcgccgctgccaccgcttcctgccctgcgagaacaagagcaaggccgtggagcaggtgaagaacgccttcaacaagctgcaggagaagggcatctacaaggccatgagcgagttcgacatcttcatcaactacatcgaggcctacatgaccatgaagatccgcaac

SEQ ID NO: 214 - DNA, 633 bp, Artificial Sequence
  Description of Artificial Sequence: Synthetic Transcript Sequence
atggtcgcccacaatcaagtcgccgccgataacgccgtgtcaaccgctgcagaacctcgccgccgcccggagccgtcctcatcgagctcaagctcgcccgctgcgcctgcccggccacgcccgtgcccagctgtgccggcgccagcccctggggacacccacttcagaactttccgctctcatgctgactacagaaggatcactcgtgcatccgccctgctggacgcgtgcggcttctactggggtccgttgagcgtgcatggagcgcacgagcggcttcgcgccgaaccggtggggacgttccttgttcgggattccaggcagcgaaactgtttctttgcgttgtcagtcaagatggcctcgggacctacttcgatcagagtgcacttccaagcgggccggttccacctggacggatcgcgcgagtcctttgactgcctcttcgaactgctggaacattacgtggccgcacccagacggatgctgggagctccactccgccagcggcgcgtcagaccgctgcaagaactctgcagacagcggattgtggcaaccgtgggaagggagaacctggcacgcatccccctcaatccggtgctgcgggattacctctccagctttccattccagatc

SEQ ID NO: 215 - DNA, 633 bp, Artificial Sequence
  Description of Artificial Sequence: Synthetic Transcript Sequence
atggtcgcccacaatcaagtcgccgctgataacgctgtttccactgccgccgaaccacgccgccgtcctgaaccgtcatcgtcatcgagctcgagccccgcggcgcctgcccgccctagaccgtgccctgctgtgccagccccagcacccggtgacacccactttcgcacgttcagaagccatgccgattacaggcggatcactagagcatccgcgctcctggacgcctgcgggttctactggggaccactgtccgtgcatggagcacacgagcggcttcgcgctgagcccgtgggcaccttccttgtgcgcgacagcagacagcggaattgtttctttgcgctgtcagtgaagatggcttctggaccgacctcaatccgggtgcacttccaagccggacgcttccatttggacggctcccgcgaatcctttgattgcttgttcgagctgctggagcactacgtggcagccccgcgccggatgctgggagcaccgctgcgccagcggcgggtccggccgctccaagaactgtgcagacagaggattgtcgcgactgtggggcgagaaaacctcgcgaggatcccgctcaacccggtgctcagagactacctgtcgtcgttcccattccagatc

SEQ ID NO: 216 - RNA, 695 nt, Artificial Sequence
  Description of Artificial Sequence: Synthetic Transcript Sequence
gggaaauaagagagaaaagaagaguaagaagaaauauaagagccaccaugcauagcucagcccucuuguguugccugguucuucuuacgggagugcgggcuucgccaggccaagggacucaguccgaaaacucguguacccacuuucccggaaaccugccuaacaugcuucgggaucucagagaugcguucucgcgcgucaagaccuucuuccaaaugaaggaccaacucgauaaccugcuucucaaagaaucacugcuugaggacuuuaaggguuaucuugguugucaggcauuguccgagaugauccaguuuuaccuugaggaagugaugccgcaagcggaaaaccaggauccagacauuaaggcacaugugaauagccuuggagaaaaucucaaaacccugaggcugcgucugcgaagaugccacagauuucugccuugugagaauaagucuaaggcaguggagcaggucaagaacgcauucaacaagcugcaagaaaaaggcauauacaaagccauguccgaauuugauaucuuuaucaacuacauugaagcauacaugacuaugaagauucgcaauugauaauaggcuggagccucgguggccaugcuucuugccccuugggccuccccccagccccuccuccccuuccugcacccguacccccguggucuuugaauaaagucugagugg

SEQ ID NO: 217 - DNA, 822 bp, Artificial Sequence
  Description of Artificial Sequence: Synthetic Transcript Sequence
taatacgactcactatagggaaataagagagaaaagaagagtaagaagaaatataagagccaccatggtcgcccacaatcaagtcgccgccgataacgccgtgtcaaccgctgcagaacctcgccgccgcccggagccgtcctcatcgagctcaagctcgcccgctgcgcctgcccggccacgcccgtgcccagctgtgccggcgccagcccctggggacacccacttcagaactttccgctctcatgctgactacagaaggatcactcgtgcatccgccctgctggacgcgtgcggcttctactggggtccgttgagcgtgcatggagcgcacgagcggcttcgcgccgaaccggtggggacgttccttgttcgggattccaggcagcgaaactgtttctttgcgttgtcagtcaagatggcctcgggacctacttcgatcagagtgcacttccaagcgggccggttccacctggacggatcgcgcgagtcctttgactgcctcttcgaactgctggaacattacgtggccgcacccagacggatgctgggagctccactccgccagcggcgcgtcagaccgctgcaagaactctgcagacagcggattgtggcaaccgtgggaagggagaacctggcacgcatccccctcaatccggtgctgcgggattacctctccagctttccattccagatctgataataggctggagcctcggtggccatgcttcttgccccttgggcctccccccagcccctcctccccttcctgcacccgtacccccgtggtctttgaataaagtctgagtgggcggctctaga

SEQ ID NO: 218 - DNA, 844 bp, Artificial Sequence
  Description of Artificial Sequence: Synthetic Transcript Sequence
taatacgactcactatagggaaataagagagaaaagaagagtaagaagaaatataagagccaccatggtcgcccacaatcaagtcgccgctgataacgctgtttccactgccgccgaaccacgccgccgtcctgaaccgtcatcgtcatcgagctcgagccccgcggcgcctgcccgccctagaccgtgccctgctgtgccagccccagcacccggtgacacccactttcgcacgttcagaagccatgccgattacaggcggatcactagagcatccgcgctcctggacgcctgcgggttctactggggaccactgtccgtgcatggagcacacgagcggcttcgcgctgagcccgtgggcaccttccttgtgcgcgacagcagacagcggaattgtttctttgcgctgtcagtgaagatggcttctggaccgacctcaatccgggtgcacttccaagccggacgcttccatttggacggctcccgcgaatcctttgattgcttgttcgagctgctggagcactacgtggcagccccgcgccggatgctgggagcaccgctgcgccagcggcgggtccggccgctccaagaactgtgcagacagaggattgtcgcgactgtggggcgagaaaacctcgcgaggatcccgctcaacccggtgctcagagactacctgtcgtcgttcccattccagatctgataataggctggagcctcggtggccatgcttcttgccccttgggcctccccccagcccctcctccccttcctgcacccgtaccccccaaacaccattgtcacactccagtggtctttgaataaagtctgagtgggcggctctaga

SEQ ID NO: 219 - RNA, 1316 nt, Artificial Sequence
  Description of Artificial Sequence: Synthetic Transcript Sequence
gggaaauaagagagaaaagaagaguaagaagaaauauaagagccaccaugcccccaucgggauugagauuguugccccuucugcuuccgcugcuuugguugcucguccugaccccuggcaggcccgcagcgggguugucgacguguaagacgauugacauggagcucgugaaacgcaagagaauugaagcaaucaggggucaaauucugagcaaacucagacucgcauccccaccgucccagggugaggucccaccgggaccucugcccgaggcgguccuggccuuguacaacucgacacgcgaccgagucgcaggggagucagcggaacccgagcccgaacccgaggccgacuacuacgccaaagaggucacucgggucuugaugguggaaacucacaacgaaaucuacgacaaguuuaagcagucgacccauucgaucuacauguucuucaauaccagcgagcuuagagaagcgguccccgagccgguacuuuuguccagagcggagcugcgguugcucaggcucaagcugaaaguggaacagcacguagagcuuuaucagaaguacagcaacaauucauggcgguaucucucgaaccggcuguuggcgccgucggauucacccgaauggcucagcuuugaugucacggggguggugcgccagugguuguccaggggcggagagaucgaaggauuucggcucucagcccacuguucgugugauagcagggacaacacgcuccaaguagauaucaacggauucacuacuggucgcagaggggaucuugcgacaauccacgguaugaaucgcccuuuucuccugcugauggccacaccccuugaacgggcgcaacaucuucagucaucccgccauaggagagcacuggacacgaacuacuguuuuucgucgacagagaagaauugcugcgugcggcagcuuuacaucgacuuccgaaaagaucucggguggaaauggauucaugaaccgaagggguaucacgccaacuucugccuggguccguguccuuauaucuggucguuggauacacaguauucaaagguguuggcucuuuacaaucagcacaacccgggagccucggcugcgccuuguugcguaccccaggcauuggagccauugccgauuguguauuaugugggaagaaagccgaaaguggagcaguugucgaauaugaucguacggagcugcaaaugcuccugauaagcugccuucugcggggcuugccuucuggccaugcccuucuucucucccuugcaccuguaccucuuggucuuugaauaaagccugaguaggaag

SEQ ID NO: 220 - DNA, 531 bp, Artificial Sequence
  Description of Artificial Sequence: Synthetic Transcript Sequence
atgagaatcttcgccgtgttcatcttcatgacctactggcacctgctgaacgccccctacaacaagatcaaccagagaatcctggtggtggaccccgtgaccagcgagcacgagctgacctgccaggccgagggctaccccaaggccgaggtgatctggaccagcagcgaccaccaggtgctgagcggcaagaccaccaccaccaacagcaagagagaggagaagctgttcaacgtgaccagcaccctgagaatcaacaccaccaccaacgagatcttctactgcaccttcagaagactggaccccgaggagaaccacaccgccgagctggtgatccccgagctgcccctggcccacccccccaacgagagaacccacctggtgatcctgggcgccatcctgctgtgcctgggcgtggccctgaccttcatcttcagactgagaaagggcagaatgatggacgtgaagaagtgcggcatccaggacaccaacagcaagaagcagagcgacacccacctggaggagacctag

SEQ ID NO: 221 - DNA, 873 bp, Artificial Sequence
  Description of Artificial Sequence: Synthetic Transcript Sequence
atgagaatcttcgccgtgttcatcttcatgacctactggcacctgctgaacgccttcaccgtgaccgtgcccaaggacctgtacgtggtggagtacggcagcaacatgaccatcgagtgcaagttccccgtggagaagcagctggacctggccgccctgatcgtgtactgggagatggaggacaagaacatcatccagttcgtgcacggcgaggaggacctgaaggtgcagcacagcagctacagacagagagccagactgctgaaggaccagctgagcctgggcaacgccgccctgcagatcaccgacgtgaagctgcaggacgccggcgtgtacagatgcatgatcagctacggcggcgccgactacaagagaatcaccgtgaaggtgaacgccccctacaacaagatcaaccagagaatcctggtggtggaccccgtgaccagcgagcacgagctgacctgccaggccgagggctaccccaaggccgaggtgatctggaccagcagcgaccaccaggtgctgagcggcaagaccaccaccaccaacagcaagagagaggagaagctgttcaacgtgaccagcaccctgagaatcaacaccaccaccaacgagatcttctactgcaccttcagaagactggaccccgaggagaaccacaccgccgagctggtgatccccgagctgcccctggcccacccccccaacgagagaacccacctggtgatcctgggcgccatcctgctgtgcctgggcgtggccctgaccttcatcttcagactgagaaagggcagaatgatggacgtgaagaagtgcggcatccaggacaccaacagcaagaagcagagcgacacccacctggaggagacctag

SEQ ID NO: 222 - DNA, 612 bp, Artificial Sequence
  Description of Artificial Sequence: Synthetic Transcript Sequence
atggtgagactgcccctgcagtgcgtgctgtggggctgcctgctgaccgccgtgcaccccgagccccccaccgcctgcagagagaagcagtacctgatcaacagccagtgctgcagcctgtgccagcccggccagaagctggtgagcgactgcaccgagttcaccgagaccgagtgcctgccctgcggcgagagcgagttcctggacacctggaacagagagacccactgccaccagcacaagtactgcgaccccaacctgggcctgagagtgcagcagaagggcaccagcgagaccgacaccatctgcacctgcgaggagggctggcactgcaccagcgaggcctgcgagagctgcgtgctgcacagaagctgcagccccggcttcggcgtgaagcagatcgccaccggcgtgagcgacaccatctgcgagccctgccccgtgggcttcttcagcaacgtgagcagcgccttcgagaagtgccacccctggaccagaagccccggcagcgccgagagccccggcggcgacccccaccacctgagagaccccgtgtgccaccccctgggcgccggcctgtaccagaagggcggccaggaggccaaccagtag

SEQ ID NO: 223 - DNA, 786 bp, Artificial Sequence
  Description of Artificial Sequence: Synthetic Transcript Sequence
ggcagaagccccctgagaaccagagacagagtgctgaccaactgggaggacggcctgaccgtggcctacggcgccgtgaagctgatccagagcctgagcctgcagcccgtgggctggcagcagaactggggcctgagcagcccccccaccatgctgctgcccagcagagcccagagccccaccgagctgcccctggcccccctggccgagcccaacaccggctgcagcagcctgctgagctggcacagcaccagaggcgagctgcacctgtgggccctgggcctgggccagatgggcggcagcaagtgcggcagccccctgagccccctggcccccaccctggaggccctgagaagaccctggtgcggccagcagggcgccggcggcaccagaggcatcagcaccgacccccccagcggcaagggcggcagagcctggggcagagaccccctgcccagagagggcctgctgagaggcaccgccgcccccgccgccggcggcgacctgaccccctgcctgagcagaccccccacccccagcagaaaccccagaagaagcatcttccccaccatcttcctggcccccaccctgctgctgcagtgcagaagactgtacatggacgccaacagaagccccagaagaatggccaagagagtggccagccagtgcagaagagacagcgaggccgcccccacccaggagtgcggccacgtgggcaagcaggccgtgggccagagagcctggtgctgctgctgctgcggcgtgagagtgagaggctggcactag

SEQ ID NO: 224 - DNA, 834 bp, Artificial Sequence
  Description of Artificial Sequence: Synthetic Transcript Sequence
atggtgagactgcccctgcagtgcgtgctgtggggctgcctgctgaccgccgtgcaccccgagccccccaccgcctgcagagagaagcagtacctgatcaacagccagtgctgcagcctgtgccagcccggccagaagctggtgagcgactgcaccgagttcaccgagaccgagtgcctgccctgcggcgagagcgagttcctggacacctggaacagagagacccactgccaccagcacaagtactgcgaccccaacctgggcctgagagtgcagcagaagggcaccagcgagaccgacaccatctgcacctgcgaggagggctggcactgcaccagcgaggcctgcgagagctgcgtgctgcacagaagctgcagccccggcttcggcgtgaagcagatcgccaccggcgtgagcgacaccatctgcgagccctgccccgtgggcttcttcagcaacgtgagcagcgccttcgagaagtgccacccctggaccagctgcgagaccaaggacctggtggtgcagcaggccggcaccaacaagaccgacgtggtgtgcggcccccaggacagactgagagccctggtggtgatccccatcatcttcggcatcctgttcgccatcctgctggtgctggtgttcatcaagaaggtggccaagaagcccaccaacaaggccccccaccccaagcaggagccccaggagatcaacttccccgacgacctgcccggcagcaacaccgccgcccccgtgcaggagaccctgcacggctgccagcccgtgacccaggaggacggcaaggagagcagaatcagcgtgcaggagagacagtag

SEQ ID NO: 225 - DNA, 723 bp, Artificial Sequence
  Description of Artificial Sequence: Synthetic Transcript Sequence
atgatcgagacctacaaccagaccagccccagaagcgccgccaccggcctgcccatcagcatgaagatcttcatgtacctgctgaccgtgttcctgatcacccagatgatcggcagcgccctgttcgccgtgtacctgcacagaagactggacaagatcgaggacgagagaaacctgcacgaggacttcgtgttcatgaagaccatccagagatgcaacaccggcgagagaagcctgagcctgctgaactgcgaggagatcaagagccagttcgagggcttcgtgaaggacatcatgctgaacaaggaggagaccaagaaggagaacagcttcgagatgcagaaggtgctgcagtgggccgagaagggctactacaccatgagcaacaacctggtgaccctggagaacggcaagcagctgaccgtgaagagacagggcctgtactacatctacgcccaggtgaccttctgcagcaacagagaggccagcagccaggcccccttcatcgccagcctgtgcctgaagagccccggcagattcgagagaatcctgctgagagccgccaacacccacagcagcgccaagccctgcggccagcagagcatccacctgggcggcgtgttcgagctgcagcccggcgccagcgtgttcgtgaacgtgaccgaccccagccaggtgagccacggcaccggcttcaccagcttcggcctgctgaagctgtag

SEQ ID NO: 226 - DNA, 786 bp, Artificial Sequence
  Description of Artificial Sequence: Synthetic Transcript Sequence
atgatcgagacctacaaccagaccagccccagaagcgccgccaccggcctgcccatcagcatgaagatcttcatgtacctgctgaccgtgttcctgatcacccagatgatcggcagcgccctgttcgccgtgtacctgcacagaagactggacaagatcgaggacgagagaaacctgcacgaggacttcgtgttcatgaagaccatccagagatgcaacaccggcgagagaagcctgagcctgctgaactgcgaggagatcaagagccagttcgagggcttcgtgaaggacatcatgctgaacaaggaggagaccaagaaggagaacagcttcgagatgcagaagggcgaccagaacccccagatcgccgcccacgtgatcagcgaggccagcagcaagaccaccagcgtgctgcagtgggccgagaagggctactacaccatgagcaacaacctggtgaccctggagaacggcaagcagctgaccgtgaagagacagggcctgtactacatctacgcccaggtgaccttctgcagcaacagagaggccagcagccaggcccccttcatcgccagcctgtgcctgaagagccccggcagattcgagagaatcctgctgagagccgccaacacccacagcagcgccaagccctgcggccagcagagcatccacctgggcggcgtgttcgagctgcagcccggcgccagcgtgttcgtgaacgtgaccgaccccagccaggtgagccacggcaccggcttcaccagcttcggcctgctgaagctgtag

SEQ ID NO: 227 - DNA, 5169 bp, Artificial Sequence
  Description of Artificial Sequence: Synthetic Transcript Sequence
atgagaaccggctgggccacccccagaagacccgccggcctgctgatgctgctgttctggttcttcgacctggccgagcccagcggcagagccgccaacgaccccttcaccatcgtgcacggcaacaccggcaagtgcatcaagcccgtgtacggctggatcgtggccgacgactgcgacgagaccgaggacaagctgtggaagtgggtgagccagcacagactgttccacctgcacagccagaagtgcctgggcctggacatcaccaagagcgtgaacgagctgagaatgttcagctgcgacagcagcgccatgctgtggtggaagtgcgagcaccacagcctgtacggcgccgccagatacagactggccctgaaggacggccacggcaccgccatcagcaacgccagcgacgtgtggaagaagggcggcagcgaggagagcctgtgcgaccagccctaccacgagatctacaccagagacggcaacagctacggcagaccctgcgagttccccttcctgatcgacggcacctggcaccacgactgcatcctggacgaggaccacagcggcccctggtgcgccaccaccctgaactacgagtacgacagaaagtggggcatctgcctgaagcccgagaacggctgcgaggacaactgggagaagaacgagcagttcggcagctgctaccagttcaacacccagaccgccctgagctggaaggaggcctacgtgagctgccagaaccagggcgccgacctgctgagcatcaacagcgccgccgagctgacctacctgaaggagaaggagggcatcgccaagatcttctggatcggcctgaaccagctgtacagcgccagaggctgggagtggagcgaccacaagcccctgaacttcctgaactgggaccccgacagacccagcgcccccaccatcggcggcagcagctgcgccagaatggacgccgagagcggcctgtggcagagcttcagctgcgaggcccagctgccctacgtgtgcagaaagcccctgaacaacaccgtggagctgaccgacgtgtggacctacagcgacaccagatgcgacgccggctggctgcccaacaacggcttctgctacctgctggtgaacgagagcaacagctgggacaaggcccacgccaagtgcaaggccttcagcagcgacctgatcagcatccacagcctggccgacgtggaggtggtggtgaccaagctgcacaacgaggacatcaaggaggaggtgtggatcggcctgaagaacatcaacatccccaccctgttccagtggagcgacggcaccgaggtgaccctgacctactgggacgagaacgagcccaacgtgccctacaacaagacccccaactgcgtgagctacctgggcgagctgggccagtggaaggtgcagagctgcgaggagaagctgaagtacgtgtgcaagagaaagggcgagaagctgaacgacgccagcagcgacaagatgtgcccccccgacgagggctggaagagacacggcgagacctgctacaagatctacgaggacgaggtgcccttcggcaccaactgcaacctgaccatcaccagcagattcgagcaggagtacctgaacgacctgatgaagaagtacgacaagagcctgagaaagtacttctggaccggcctgagagacgtggacagctgcggcgagtacaactgggccaccgtgggcggcagaagaagagccgtgaccttcagcaactggaacttcctggagcccgccagccccggcggctgcgtggccatgagcaccggcaagagcgtgggcaagtgggaggtgaaggactgcagaagcttcaaggccctgagcatctgcaagaagatgagcggccccctgggccccgaggaggccagccccaagcccgacgacccctgccccgagggctggcagagcttccccgccagcctgagctgctacaaggtgttccacgccgagagaatcgtgagaaagagaaactgggaggaggccgagagattctgccaggccctgggcgcccacctgagcagcttcagccacgtggacgagatcaaggagttcctgcacttcctgaccgaccagttcagcggccagcactggctgtggatcggcctgaacaagagaagccccgacctgcagggcagctggcagtggagcgacagaacccccgtgagcaccatcatcatgcccaacgagttccagcaggactacgacatcagagactgcgccgccgtgaaggtgttccacagaccctggagaagaggctggcacttctacgacgacagagagttcatctacctgagacccttcgcctgcgacaccaagctggagtgggtgtgccagatccccaagggcagaacccccaagacccccgactggtacaaccccgacagagccggcatccacggcccccccctgatcatcgagggcagcgagtactggttcgtggccgacctgcacctgaactacgaggaggccgtgctgtactgcgccagcaaccacagcttcctggccaccatcaccagcttcgtgggcctgaaggccatcaagaacaagatcgccaacatcagcggcgacggccagaagtggtggatcagaatcagcgagtggcccatcgacgaccacttcacctacagcagatacccctggcacagattccccgtgaccttcggcgaggagtgcctgtacatgagcgccaagacctggctgatcgacctgggcaagcccaccgactgcagcaccaagctgcccttcatctgcgagaagtacaacgtgagcagcctggagaagtacagccccgacagcgccgccaaggtgcagtgcagcgagcagtggatccccttccagaacaagtgcttcctgaagatcaagcccgtgagcctgaccttcagccaggccagcgacacctgccacagctacggcggcaccctgcccagcgtgctgagccagatcgagcaggacttcatcaccagcctgctgcccgacatggaggccaccctgtggatcggcctgagatggaccgcctacgagaagatcaacaagtggaccgacaacagagagctgacctacagcaacttccaccccctgctggtgagcggcagactgagaatccccgagaacttcttcgaggaggagagcagataccactgcgccctgatcctgaacctgcagaagagccccttcaccggcacctggaacttcaccagctgcagcgagagacacttcgtgagcctgtgccagaagtacagcgaggtgaagagcagacagaccctgcagaacgccagcgagaccgtgaagtacctgaacaacctgtacaagatcatccccaagaccctgacctggcacagcgccaagagagagtgcctgaagagcaacatgcagctggtgagcatcaccgacccctaccagcaggccttcctgagcgtgcaggccctgctgcacaacagcagcctgtggatcggcctgttcagccaggacgacgagctgaacttcggctggagcgacggcaagagactgcacttcagcagatgggccgagaccaacggccagctggaggactgcgtggtgctggacaccgacggcttctggaagaccgtggactgcaacgacaaccagcccggcgccatctgctactacagcggcaacgagaccgagaaggaggtgaagcccgtggacagcgtgaagtgccccagccccgtgctgaacaccccctggatccccttccagaactgctgctacaacttcatcatcaccaagaacagacacatggccaccacccaggacgaggtgcacaccaagtgccagaagctgaaccccaagagccacatcctgagcatcagagacgagaaggagaacaacttcgtgctggagcagctgctgtacttcaactacatggccagctgggtgatgctgggcatcacctacagaaacaagagcctgatgtggttcgacaagacccccctgagctacacccactggagagccggcagacccaccatcaagaacgagaagttcctggccggcctgagcaccgacggcttctgggacatccagaccttcaaggtgatcgaggaggccgtgtacttccaccagcacagcatcctggcctgcaagatcgagatggtggactacaaggaggagtacaacaccaccctgccccagttcatgccctacgaggacggcatctacagcgtgatccagaagaaggtgacctggtacgaggccctgaacatgtgcagccagagcggcggccacctggccagcgtgcacaaccagaacggccagctgttcctggaggacatcgtgaagagagacggcttccccctgtgggtgggcctgagcagccacgacggcagcgagagcagcttcgagtggagcgacggcagcaccttcgactacatcccctggaagggccagaccagccccggcaactgcgtgctgctggaccccaagggcacctggaagcacgagaagtgcaacagcgtgaaggacggcgccatctgctacaagcccaccaagagcaagaagctgagcagactgacctacagcagcagatgccccgccgccaaggagaacggcagcagatggatccagtacaagggccactgctacaagagcgaccaggccctgcacagcttcagcgaggccaagaagctgtgcagcaagcacgaccacagcgccaccatcgtgagcatcaaggacgaggacgagaacaagttcgtgagcagactgatgagagagaacaacaacatcaccatgagagtgtggctgggcctgagccagcacagcgtggaccagagctggagctggctggacggcagcgaggtgaccttcgtgaagtgggagaacaagagcaagagcggcgtgggcagatgcagcatgctgatcgccagcaacgagacctggaagaaggtggagtgcgagcacggcttcggcagagtggtgtgcaaggtgcccctgggccccgactacaccgccatcgccatcatcgtggccaccctgagcatcctggtgctgatgggcggcctgatctggttcctgttccagagacacagactgcacctggccggcttcagcagcgtgagatacgcccagggcgtgaacgaggacgagatcatgctgcccagcttccacgactag

SEQ ID NO: 228 - DNA, 5454 bp, Artificial Sequence
  Description of Artificial Sequence: Synthetic Transcript Sequence
atgagaaccggctgggccacccccagaagacccgccggcctgctgatgctgctgttctggttcttcgacctggccgagcccagcggcagagccgccaacgaccccttcaccatcgtgcacggcaacaccggcaagtgcatcaagcccgtgtacggctggatcgtggccgacgactgcgacgagaccgaggacaagctgtggaagtgggtgagccagcacagactgttccacctgcacagccagaagtgcctgggcctggacatcaccaagagcgtgaacgagctgagaatgttcagctgcgacagcagcgccatgctgtggtggaagtgcgagcaccacagcctgtacggcgccgccagatacagactggccctgaaggacggccacggcaccgccatcagcaacgccagcgacgtgtggaagaagggcggcagcgaggagagcctgtgcgaccagccctaccacgagatctacaccagagacggcaacagctacggcagaccctgcgagttccccttcctgatcgacggcacctggcaccacgactgcatcctggacgaggaccacagcggcccctggtgcgccaccaccctgaactacgagtacgacagaaagtggggcatctgcctgaagcccgagaacggctgcgaggacaactgggagaagaacgagcagttcggcagctgctaccagttcaacacccagaccgccctgagctggaaggaggcctacgtgagctgccagaaccagggcgccgacctgctgagcatcaacagcgccgccgagctgacctacctgaaggagaaggagggcatcgccaagatcttctggatcggcctgaaccagctgtacagcgccagaggctgggagtggagcgaccacaagcccctgaacttcctgaactgggaccccgacagacccagcgcccccaccatcggcggcagcagctgcgccagaatggacgccgagagcggcctgtggcagagcttcagctgcgaggcccagctgccctacgtgtgcagaaagcccctgaacaacaccgtggagctgaccgacgtgtggacctacagcgacaccagatgcgacgccggctggctgcccaacaacggcttctgctacctgctggtgaacgagagcaacagctgggacaaggcccacgccaagtgcaaggccttcagcagcgacctgatcagcatccacagcctggccgacgtggaggtggtggtgaccaagctgcacaacgaggacatcaaggaggaggtgtggatcggcctgaagaacatcaacatccccaccctgttccagtggagcgacggcaccgaggtgaccctgacctactgggacgagaacgagcccaacgtgccctacaacaagacccccaactgcgtgagctacctgggcgagctgggccagtggaaggtgcagagctgcgaggagaagctgaagtacgtgtgcaagagaaagggcgagaagctgaacgacgccagcagcgacaagatgtgcccccccgacgagggctggaagagacacggcgagacctgctacaagatctacgaggacgaggtgcccttcggcaccaactgcaacctgaccatcaccagcagattcgagcaggagtacctgaacgacctgatgaagaagtacgacaagagcctgagaaagtacttctggaccggcctgagagacgtggacagctgcggcgagtacaactgggccaccgtgggcggcagaagaagagccgtgaccttcagcaactggaacttcctggagcccgccagccccggcggctgcgtggccatgagcaccggcaagagcgtgggcaagtgggaggtgaaggactgcagaagcttcaaggccctgagcatctgcaagaagatgagcggccccctgggccccgaggaggccagccccaagcccgacgacccctgccccgagggctggcagagcttccccgccagcctgagctgctacaaggtgttccacgccgagagaatcgtgagaaagagaaactgggaggaggccgagagattctgccaggccctgggcgcccacctgagcagcttcagccacgtggacgagatcaaggagttcctgcacttcctgaccgaccagttcagcggccagcactggctgtggatcggcctgaacaagagaagccccgacctgcagggcagctggcagtggagcgacagaacccccgtgagcaccatcatcatgcccaacgagttccagcaggactacgacatcagagactgcgccgccgtgaaggtgttccacagaccctggagaagaggctggcacttctacgacgacagagagttcatctacctgagacccttcgcctgcgacaccaagctggagtgggtgtgccagatccccaagggcagaacccccaagacccccgactggtacaaccccgacagagccggcatccacggcccccccctgatcatcgagggcagcgagtactggttcgtggccgacctgcacctgaactacgaggaggccgtgctgtactgcgccagcaaccacagcttcctggccaccatcaccagcttcgtgggcctgaaggccatcaagaacaagatcgccaacatcagcggcgacggccagaagtggtggatcagaatcagcgagtggcccatcgacgaccacttcacctacagcagatacccctggcacagattccccgtgaccttcggcgaggagtgcctgtacatgagcgccaagacctggctgatcgacctgggcaagcccaccgactgcagcaccaagctgcccttcatctgcgagaagtacaacgtgagcagcctggagaagtacagccccgacagcgccgccaaggtgcagtgcagcgagcagtggatccccttccagaacaagtgcttcctgaagatcaagcccgtgagcctgaccttcagccaggccagcgacacctgccacagctacggcggcaccctgcccagcgtgctgagccagatcgagcaggacttcatcaccagcctgctgcccgacatggaggccaccctgtggatcggcctgagatggaccgcctacgagaagatcaacaagtggaccgacaacagagagctgacctacagcaacttccaccccctgctggtgagcggcagactgagaatccccgagaacttcttcgaggaggagagcagataccactgcgccctgatcctgaacctgcagaagagccccttcaccggcacctggaacttcaccagctgcagcgagagacacttcgtgagcctgtgccagaagtacagcgaggtgaagagcagacagaccctgcagaacgccagcgagaccgtgaagtacctgaacaacctgtacaagatcatccccaagaccctgacctggcacagcgccaagagagagtgcctgaagagcaacatgcagctggtgagcatcaccgacccctaccagcaggccttcctgagcgtgcaggccctgctgcacaacagcagcctgtggatcggcctgttcagccaggacgacgagctgaacttcggctggagcgacggcaagagactgcacttcagcagatgggccgagaccaacggccagctggaggactgcgtggtgctggacaccgacggcttctggaagaccgtggactgcaacgacaaccagcccggcgccatctgctactacagcggcaacgagaccgagaaggaggtgaagcccgtggacagcgtgaagtgccccagccccgtgctgaacaccccctggatccccttccagaactgctgctacaacttcatcatcaccaagaacagacacatggccaccacccaggacgaggtgcacaccaagtgccagaagctgaaccccaagagccacatcctgagcatcagagacgagaaggagaacaacttcgtgctggagcagctgctgtacttcaactacatggccagctgggtgatgctgggcatcacctacagaaacaagagcctgatgtggttcgacaagacccccctgagctacacccactggagagccggcagacccaccatcaagaacgagaagttcctggccggcctgagcaccgacggcttctgggacatccagaccttcaaggtgatcgaggaggccgtgtacttccaccagcacagcatcctggcctgcaagatcgagatggtggactacaaggaggagtacaacaccaccctgccccagttcatgccctacgaggacggcatctacagcgtgatccagaagaaggtgacctggtacgaggccctgaacatgtgcagccagagcggcggccacctggccagcgtgcacaaccagaacggccagctgttcctggaggacatcgtgaagagagacggcttccccctgtgggtgggcctgagcagccacgacggcagcgagagcagcttcgagtggagcgacggcagcaccttcgactacatcccctggaagggccagaccagccccggcaactgcgtgctgctggaccccaagggcacctggaagcacgagaagtgcaacagcgtgaaggacggcgccatctgctacaagcccaccaagagcaagaagctgagcagactgacctacagcagcagatgccccgccgccaaggagaacggcagcagatggatccagtacaagggccactgctacaagagcgaccaggccctgcacagcttcagcgaggccaagaagctgtgcagcaagcacgaccacagcgccaccatcgtgagcatcaaggacgaggacgagaacaagttcgtgagcagactgatgagagagaacaacaacatcaccatgagagtgtggctgggcctgagccagcacagcgtggactgccccagcagcacctggatccagttccaggacagctgctacatcttcctgcaggaggccatcaaggtggagagcatcgaggacgtgagaaaccagtgcaccgaccacggcgccgacatgatcagcatccacaacgaggaggagaacgccttcatcctggacaccctgaagaagcagtggaagggccccgacgacatcctgctgggcatgttctacgacaccgacgacgccagcttcaagtggttcgacaacagcaacatgaccttcgacaagtggaccgaccaggacgacgacgaggacctggtggacacctgcgccttcctgcacatcaagaccggcgagtggaagaagggcaactgcgaggtgagcagcgtggagggcaccctgtgcaagaccgccatcccctacaagagaaagtacctgagcgacaaccacatcctgatcagcgccctggtgatcgccagcaccgtgatcctgaccgtgctgggcgccatcatctggttcctgtacaagaagcacagcgacagcagattcaccaccgtgttcagcaccgccccccagagcccctacaacgaggactgcgtgctggtggtgggcgaggagaacgagtaccccgtgcagttcgactag

SEQ ID NO: 229 - DNA, 5622 bp, Artificial Sequence
  Description of Artificial Sequence: Synthetic Transcript Sequence
atgagaaccggctgggccacccccagaagacccgccggcctgctgatgctgctgttctggttcttcgacctggccgagcccagcggcagagccgccaacgaccccttcaccatcgtgcacggcaacaccggcaagtgcatcaagcccgtgtacggctggatcgtggccgacgactgcgacgagaccgaggacaagctgtggaagtgggtgagccagcacagactgttccacctgcacagccagaagtgcctgggcctggacatcaccaagagcgtgaacgagctgagaatgttcagctgcgacagcagcgccatgctgtggtggaagtgcgagcaccacagcctgtacggcgccgccagatacagactggccctgaaggacggccacggcaccgccatcagcaacgccagcgacgtgtggaagaagggcggcagcgaggagagcctgtgcgaccagccctaccacgagatctacaccagagacggcaacagctacggcagaccctgcgagttccccttcctgatcgacggcacctggcaccacgactgcatcctggacgaggaccacagcggcccctggtgcgccaccaccctgaactacgagtacgacagaaagtggggcatctgcctgaagcccgagaacggctgcgaggacaactgggagaagaacgagcagttcggcagctgctaccagttcaacacccagaccgccctgagctggaaggaggcctacgtgagctgccagaaccagggcgccgacctgctgagcatcaacagcgccgccgagctgacctacctgaaggagaaggagggcatcgccaagatcttctggatcggcctgaaccagctgtacagcgccagaggctgggagtggagcgaccacaagcccctgaacttcctgaactgggaccccgacagacccagcgcccccaccatcggcggcagcagctgcgccagaatggacgccgagagcggcctgtggcagagcttcagctgcgaggcccagctgccctacgtgtgcagaaagcccctgaacaacaccgtggagctgaccgacgtgtggacctacagcgacaccagatgcgacgccggctggctgcccaacaacggcttctgctacctgctggtgaacgagagcaacagctgggacaaggcccacgccaagtgcaaggccttcagcagcgacctgatcagcatccacagcctggccgacgtggaggtggtggtgaccaagctgcacaacgaggacatcaaggaggaggtgtggatcggcctgaagaacatcaacatccccaccctgttccagtggagcgacggcaccgaggtgaccctgacctactgggacgagaacgagcccaacgtgccctacaacaagacccccaactgcgtgagctacctgggcgagctgggccagtggaaggtgcagagctgcgaggagaagctgaagtacgtgtgcaagagaaagggcgagaagctgaacgacgccagcagcgacaagatgtgcccccccgacgagggctggaagagacacggcgagacctgctacaagatctacgaggacgaggtgcccttcggcaccaactgcaacctgaccatcaccagcagattcgagcaggagtacctgaacgacctgatgaagaagtacgacaagagcctgagaaagtacttctggaccggcctgagagacgtggacagctgcggcgagtacaactgggccaccgtgggcggcagaagaagagccgtgaccttcagcaactggaacttcctggagcccgccagccccggcggctgcgtggccatgagcaccggcaagagcgtgggcaagtgggaggtgaaggactgcagaagcttcaaggccctgagcatctgcaagaagatgagcggccccctgggccccgaggaggccagccccaagcccgacgacccctgccccgagggctggcagagcttccccgccagcctgagctgctacaaggtgttccacgccgagagaatcgtgagaaagagaaactgggaggaggccgagagattctgccaggccctgggcgcccacctgagcagcttcagccacgtggacgagatcaaggagttcctgcacttcctgaccgaccagttcagcggccagcactggctgtggatcggcctgaacaagagaagccccgacctgcagggcagctggcagtggagcgacagaacccccgtgagcaccatcatcatgcccaacgagttccagcaggactacgacatcagagactgcgccgccgtgaaggtgttccacagaccctggagaagaggctggcacttctacgacgacagagagttcatctacctgagacccttcgcctgcgacaccaagctggagtgggtgtgccagatccccaagggcagaacccccaagacccccgactggtacaaccccgacagagccggcatccacggcccccccctgatcatcgagggcagcgagtactggttcgtggccgacctgcacctgaactacgaggaggccgtgctgtactgcgccagcaaccacagcttcctggccaccatcaccagcttcgtgggcctgaaggccatcaagaacaagatcgccaacatcagcggcgacggccagaagtggtggatcagaatcagcgagtggcccatcgacgaccacttcacctacagcagatacccctggcacagattccccgtgaccttcggcgaggagtgcctgtacatgagcgccaagacctggctgatcgacctgggcaagcccaccgactgcagcaccaagctgcccttcatctgcgagaagtacaacgtgagcagcctggagaagtacagccccgacagcgccgccaaggtgcagtgcagcgagcagtggatccccttccagaacaagtgcttcctgaagatcaagcccgtgagcctgaccttcagccaggccagcgacacctgccacagctacggcggcaccctgcccagcgtgctgagccagatcgagcaggacttcatcaccagcctgctgcccgacatggaggccaccctgtggatcggcctgagatggaccgcctacgagaagatcaacaagtggaccgacaacagagagctgacctacagcaacttccaccccctgctggtgagcggcagactgagaatccccgagaacttcttcgaggaggagagcagataccactgcgccctgatcctgaacctgcagaagagccccttcaccggcacctggaacttcaccagctgcagcgagagacacttcgtgagcctgtgccagaagtacagcgaggtgaagagcagacagaccctgcagaacgccagcgagaccgtgaagtacctgaacaacctgtacaagatcatccccaagaccctgacctggcacagcgccaagagagagtgcctgaagagcaacatgcagctggtgagcatcaccgacccctaccagcaggccttcctgagcgtgcaggccctgctgcacaacagcagcctgtggatcggcctgttcagccaggacgacgagctgaacttcggctggagcgacggcaagagactgcacttcagcagatgggccgagaccaacggccagctggaggactgcgtggtgctggacaccgacggcttctggaagaccgtggactgcaacgacaaccagcccggcgccatctgctactacagcggcaacgagaccgagaaggaggtgaagcccgtggacagcgtgaagtgccccagccccgtgctgaacaccccctggatccccttccagaactgctgctacaacttcatcatcaccaagaacagacacatggccaccacccaggacgaggtgcacaccaagtgccagaagctgaaccccaagagccacatcctgagcatcagagacgagaaggagaacaacttcgtgctggagcagctgctgtacttcaactacatggccagctgggtgatgctgggcatcacctacagaaacaagagcctgatgtggttcgacaagacccccctgagctacacccactggagagccggcagacccaccatcaagaacgagaagttcctggccggcctgagcaccgacggcttctgggacatccagaccttcaaggtgatcgaggaggccgtgtacttccaccagcacagcatcctggcctgcaagatcgagatggtggactacaaggaggagtacaacaccaccctgccccagttcatgccctacgaggacggcatctacagcgtgatccagaagaaggtgacctggtacgaggccctgaacatgtgcagccagagcggcggccacctggccagcgtgcacaaccagaacggccagctgttcctggaggacatcgtgaagagagacggcttccccctgtgggtgggcctgagcagccacgacggcagcgagagcagcttcgagtggagcgacggcagcaccttcgactacatcccctggaagggccagaccagccccggcaactgcgtgctgctggaccccaagggcacctggaagcacgagaagtgcaacagcgtgaaggacggcgccatctgctacaagcccaccaagagcaagaagctgagcagactgacctacagcagcagatgccccgccgccaaggagaacggcagcagatggatccagtacaagggccactgctacaagagcgaccaggccctgcacagcttcagcgaggccaagaagctgtgcagcaagcacgaccacagcgccaccatcgtgagcatcaaggacgaggacgagaacaagttcgtgagcagactgatgagagagaacaacaacatcaccatgagagtgtggctgggcctgagccagcacagcgtggaccagagctggagctggctggacggcagcgaggtgaccttcgtgaagtgggagaacaagagcaagagcggcgtgggcagatgcagcatgctgatcgccagcaacgagacctggaagaaggtggagtgcgagcacggcttcggcagagtggtgtgcaaggtgcccctggactgccccagcagcacctggatccagttccaggacagctgctacatcttcctgcaggaggccatcaaggtggagagcatcgaggacgtgagaaaccagtgcaccgaccacggcgccgacatgatcagcatccacaacgaggaggagaacgccttcatcctggacaccctgaagaagcagtggaagggccccgacgacatcctgctgggcatgttctacgacaccgacgacgccagcttcaagtggttcgacaacagcaacatgaccttcgacaagtggaccgaccaggacgacgacgaggacctggtggacacctgcgccttcctgcacatcaagaccggcgagtggaagaagggcaactgcgaggtgagcagcgtggagggcaccctgtgcaagaccgccatcccctacaagagaaagtacctgagcgacaaccacatcctgatcagcgccctggtgatcgccagcaccgtgatcctgaccgtgctgggcgccatcatctggttcctgtacaagaagcacagcgacagcagattcaccaccgtgttcagcaccgccccccagagcccctacaacgaggactgcgtgctggtggtgggcgaggagaacgagtaccccgtgcagttcgactag

SEQ ID NO: 230 - DNA, 186 bp, Artificial Sequence
  Description of Artificial Sequence: Synthetic Transcript Sequence
atgaagagattcctgttcctgctgctgaccatcagcctgctggtgatggtgcagatccagaccggcctgagcggccagaacgacaccagccagaccagcagccccagcgccagcagcaacatcagcggcggcatcttcctgttcttcgtggccaacgccatcatccacctgttctgcttcagctag

SEQ ID NO: 231 - DNA, 1062 bp, Artificial Sequence
  Description of Artificial Sequence: Synthetic Transcript Sequence
atggagctgaccgagctgctgctggtggtgatgctgctgctgaccgccagactgaccctgagcagccccgccccccccgcctgcgacctgagagtgctgagcaagctgctgagagacagccacgtgctgcacagcagactgagccagtgccccgaggtgcaccccctgcccacccccgtgctgctgcccgccgtggacttcagcctgggcgagtggaagacccagatggaggagaccaaggcccaggacatcctgggcgccgtgaccctgctgctggagggcgtgatggccgccagaggccagctgggccccacctgcctgagcagcctgctgggccagctgagcggccaggtgagactgctgctgggcgccctgcagagcctgctgggcacccagctgcccccccagggcagaaccaccgcccacaaggaccccaacgccatcttcctgagcttccagcacctgctgagaggcaaggtgagattcctgatgctggtgggcggcagcaccctgtgcgtgagaagagccccccccaccaccgccgtgcccagcagaaccagcctggtgctgaccctgaacgagctgcccaacagaaccagcggcctgctggagaccaacttcaccgccagcgccagaaccaccggcagcggcctgctgaagtggcagcagggcttcagagccaagatccccggcctgctgaaccagaccagcagaagcctggaccagatccccggctacctgaacagaatccacgagctgctgaacggcaccagaggcctgttccccggccccagcagaagaaccctgggcgcccccgacatcagcagcggcaccagcgacaccggcagcctgccccccaacctgcagcccggctacagccccagccccacccacccccccaccggccagtacaccctgttccccctgccccccaccctgcccacccccgtggtgcagctgcaccccctgctgcccgaccccagcgcccccacccccacccccaccagccccctgctgaacaccagctacacccacagccagaacctgagccaggagggctag

SEQ ID NO: 232 - DNA, 537 bp, Artificial Sequence
  Description of Artificial Sequence: Synthetic Transcript Sequence
atgaccgtgctggcccccgcctggagccccaccacctacctgctgctgctgctgctgctgagcagcggcctgagcggcacccaggactgcagcttccagcacagccccatcagcagcgacttcgccgtgaagatcagagagctgagcgactacctgctgcaggactaccccgtgaccgtggccagcaacctgcaggacgaggagctgtgcggcggcctgtggagactggtgctggcccagagatggatggagagactgaagaccgtggccggcagcaagatgcagggcctgctggagagagtgaacaccgagatccacttcgtgaccaagtgcgccttccagcccccccccagctgcctgagattcgtgcagaccaacatcagcagactgctgcaggagaccagcgagcagctggtggccctgaagccctggatcaccagacagaacttcagcagatgcctggagctgcagtgccagcccgtggagaccgtgttccacagagtgagccaggacggcctggacctgctgaccagctag

SEQ ID NO: 233 - DNA, 708 bp, Artificial Sequence
  Description of Artificial Sequence: Synthetic Transcript Sequence
atgaccgtgctggcccccgcctggagccccaccacctacctgctgctgctgctgctgctgagcagcggcctgagcggcacccaggactgcagcttccagcacagccccatcagcagcgacttcgccgtgaagatcagagagctgagcgactacctgctgcaggactaccccgtgaccgtggccagcaacctgcaggacgaggagctgtgcggcggcctgtggagactggtgctggcccagagatggatggagagactgaagaccgtggccggcagcaagatgcagggcctgctggagagagtgaacaccgagatccacttcgtgaccaagtgcgccttccagcccccccccagctgcctgagattcgtgcagaccaacatcagcagactgctgcaggagaccagcgagcagctggtggccctgaagccctggatcaccagacagaacttcagcagatgcctggagctgcagtgccagcccgacagcagcaccctgccccccccctggagccccagacccctggaggccaccgcccccaccgccccccagccccccctgctgctgctgctgctgctgcccgtgggcctgctgctgctggccgccgcctggtgcctgcactggcagagaaccagaagaagaacccccagacccggcgagcaggtgccccccgtgcccagcccccaggacctgctgctggtggagcactag

SEQ ID NO: 234 - DNA, 1110 bp, Artificial Sequence
  Description of Artificial Sequence: Synthetic Transcript Sequence
atggtgtgggcccccctgggcccccccagaaccgactgcctgaccctgctgcacacccccagcaaggacagccccaagatgagcctggagtggctggtggcctggagctggagcctggacggcctgagagactgcatcgccaccggcatccagagcgtgagagactgcgacaccaccgccgtgatcaccgtggcctgcctgctggtgctgttcgtgtggtactgctaccacgtgggcagagagcagcccagaccctacgtgagcgtgaacagcctgatgcaggccgccgacgccaacggcctgcagaacggctacgtgtactgccagagccccgagtgcgtgagatgcacccacaacgagggcctgaaccagaagctgtaccacaacctgcaggagtacgccaagagatacagctggagcggcatgggcagaatccacaagggcatcagagagcagggcagatacctgaacagcagacccagcatccagaagcccgaggtgttcttcctgcccgacctgcccaccaccccctacttcagcagagacgcccagaagcacgacgtggaggtgctggagagaaacttccagaccatcctgtgcgagttcgagaccctgtacaaggccttcagcaactgcagcctgccccagggctggaagatgaacagcacccccagcggcgagtggttcaccttctacctggtgaaccagggcgtgtgcgtgcccagaaactgcagaaagtgccccagaacctacagactgctgggcagcctgagaacctgcatcggcaacaacgtgttcggcaacgcctgcatcagcgtgctgagccccggcaccgtgatcaccgagcactacggccccaccaacatcagaatcagatgccacctgggcctgaagacccccaacggctgcgagctggtggtgggcggcgagccccagtgctgggccgagggcagatgcctgctgttcgacgacagcttcctgcacgccgccttccacgagggcagcgccgaggacggccccagagtggtgttcatggtggacctgtggcaccccaacgtggccgccgccgagagacaggccctggacttcatcttcgcccccggcagatag

SEQ ID NO: 235 - DNA, 1989 bp, Artificial Sequence
  Description of Artificial Sequence: Synthetic Transcript Sequence
atgagaccccagatcctgctgctgctggccctgctgaccctgggcctggccgcccagcaccaggacaaggtgccctgcaagatggtggacaagaaggtgagctgccaggtgctgggcctgctgcaggtgcccagcgtgctgccccccgacaccgagaccctggacctgagcggcaaccagctgagaagcatcctggccagccccctgggcttctacaccgccctgagacacctggacctgagcaccaacgagatcagcttcctgcagcccggcgccttccaggccctgacccacctggagcacctgagcctggcccacaacagactggccatggccaccgccctgagcgccggcggcctgggccccctgcccagagtgaccagcctggacctgagcggcaacagcctgtacagcggcctgctggagagactgctgggcgaggcccccagcctgcacaccctgagcctggccgagaacagcctgaccagactgaccagacacaccttcagagacatgcccgccctggagcagctggacctgcacagcaacgtgctgatggacatcgaggacggcgccttcgagggcctgcccagactgacccacctgaacctgagcagaaacagcctgacctgcatcagcgacttcagcctgcagcagctgagagtgctggacctgagctgcaacagcatcgaggccttccagaccgccagccagccccaggccgagttccagctgacctggctggacctgagagagaacaagctgctgcacttccccgacctggccgccctgcccagactgatctacctgaacctgagcaacaacctgatcagactgcccaccggccccccccaggacagcaagggcatccacgcccccagcgagggctggagcgccctgcccctgagcgcccccagcggcaacgccagcggcagacccctgagccagctgctgaacctggacctgagctacaacgagatcgagctgatccccgacagcttcctggagcacctgaccagcctgtgcttcctgaacctgagcagaaactgcctgagaaccttcgaggccagaagactgggcagcctgccctgcctgatgctgctggacctgagccacaacgccctggagaccctggagctgggcgccagagccctgggcagcctgagaaccctgctgctgcagggcaacgccctgagagacctgcccccctacaccttcgccaacctggccagcctgcagagactgaacctgcagggcaacagagtgagcccctgcggcggccccgacgagcccggccccagcggctgcgtggccttcagcggcatcaccagcctgagaagcctgagcctggtggacaacgagatcgagctgctgagagccggcgccttcctgcacacccccctgaccgagctggacctgagcagcaaccccggcctggaggtggccaccggcgccctgggcggcctggaggccagcctggaggtgctggccctgcagggcaacggcctgatggtgctgcaggtggacctgccctgcttcatctgcctgaagagactgaacctggccgagaacagactgagccacctgcccgcctggacccaggccgtgagcctggaggtgctggacctgagaaacaacagcttcagcctgctgcccggcagcgccatgggcggcctggagaccagcctgagaagactgtacctgcagggcaaccccctgagctgctgcggcaacggctggctggccgcccagctgcaccagggcagagtggacgtggacgccacccaggacctgatctgcagattcagcagccaggaggaggtgagcctgagccacgtgagacccgaggactgcgagaagggcggcctgaagaacatcaacctgatcatcatcctgaccttcatcctggtgagcgccatcctgctgaccaccctggccgcctgctgctgcgtgagaagacagaagttcaaccagcagtacaaggcctag

SEQ ID NO: 236 - DNA, 1989 bp, Artificial Sequence; identical to SEQ ID NO: 235
  Description of Artificial Sequence: Synthetic Transcript Sequence

SEQ ID NO: 237 - DNA, 1989 bp, Artificial Sequence; identical to SEQ ID NO: 235
  Description of Artificial Sequence: Synthetic Transcript Sequence

SEQ ID NO: 238 - DNA, 561 bp, Artificial Sequence
  Description of Artificial Sequence: Synthetic Transcript Sequence
atgagaccccagatcctgctgctgctggccctgctgaccctgggcctggccgcccagcaccaggacaaggtgccctgcaagatggtggacaagaaggtgagctgccaggtgctgggcctgctgcaggtgcccagcgtgctgccccccgacaccgagaccctggacctgagcggcaaccagctgagaagcatcctggccagccccctgggcttctacaccgccctgagacacctggacctgagcaccaacgagatcagcttcctgcagcccggcgccttccaggccctgacccacctggagcacctgagcctggcccacaacagactggccatggccaccgccctgagcgccggcggcctgggccccctgcccagagtgaccagcctggacctgagcggcaacagcctgtacagcggcctgctggagagactgctgggcgaggcccccagcctgcacaccctgagcctggccgagaacagcctgaccagactgaccagacacaccttcagagacatgcccgccctggagcagctggacctgcacagcaacgtgctgatgtag

SEQ ID NO: 239 - DNA, 1212 bp, Artificial Sequence
  Description of Artificial Sequence: Synthetic Transcript Sequence
atggcccacgccatggagaacagctggaccatcagcaaggagtaccacatcgacgaggaggtgggcttcgccctgcccaacccccaggagaacctgcccgacttctacaacgactggatgttcatcgccaagcacctgcccgacctgatcgagagcggccagctgagagagagagtggagaagctgaacatgctgagcatcgaccacctgaccgaccacaagagccagagactggccagactggtgctgggctgcatcaccatggcctacgtgtggggcaagggccacggcgacgtgagaaaggtgctgcccagaaacatcgccgtgccctactgccagctgagcaagaagctggagctgccccccatcctggtgtacgccgactgcgtgctggccaactggaagaagaaggaccccaacaagcccctgacctacgagaacatggacgtgctgttcagcttcagagacggcgactgcagcaagggcttcttcctggtgagcctgctggtggagatcgccgccgccagcgccatcaaggtgatccccaccgtgttcaaggccatgcagatgcaggagagagacaccctgctgaaggccctgctggagatcgccagctgcctggagaaggccctgcaggtgttccaccagatccacgaccacgtgaaccccaaggccttcttcagcgtgctgagaatctacctgagcggctggaagggcaacccccagctgagcgacggcctggtgtacgagggcttctgggaggaccccaaggagttcgccggcggcagcgccggccagagcagcgtgttccagtgcttcgacgtgctgctgggcatccagcagaccgccggcggcggccacgccgcccagttcctgcaggacatgagaagatacatgccccccgcccacagaaacttcctgtgcagcctggagagcaaccccagcgtgagagagttcgtgctgagcaagggcgacgccggcctgagagaggcctacgacgcctgcgtgaaggccctggtgagcctgagaagctaccacctgcagatcgtgaccaagtacatcctgatccccgccagccagcagcccaaggagaacaagaccagcgaggaccccagcaagctggaggccaagggcaccggcggcaccgacctgatgaacttcctgaagaccgtgagaagcaccaccgagaagagcctgctgaaggagggctag

SEQ ID NO: 240 - DNA, 237 bp, Artificial Sequence
  Description of Artificial Sequence: Synthetic Transcript Sequence
atggcccacgccatggagaacagctggaccatcagcaaggagtaccacatcgacgaggaggtgggcttcgccctgcccaacccccaggagaacctgcccgacttctacaacgactggatgttcatcgccaagcacctgcccgacctgatcgagagcggccagctgagagagagagtggagaagctgaacatgctgagcatcgaccacctgaccgaccacaagagccagagactgtag

SEQ ID NO: 241 - DNA, 543 bp, Artificial Sequence
  Description of Artificial Sequence: Synthetic Transcript Sequence
atggcccacgccatggagaacagctggaccatcagcaaggagtaccacatcgacgaggaggtgggcttcgccctgcccaacccccaggagaacctgcccgacttctacaacgactggatgttcatcgccaagcacctgcccgacctgatcgagagcggccagctgagagagagagtggagaagctgaacatgctgagcatcgaccacctgaccgaccacaagagccagagactggccagactggtgctgggctgcatcaccatggcctacgtgtggggcaagggccacggcgacgtgagaaaggtgctgcccagaaacatcgccgtgccctactgccagctgagcaagaagctggagctgccccccatcctggtgtacgccgactgcgtgctggccaactggaagaagaaggaccccaacaagcccctgacctacgagaacatggacgtgctgttcagcttcagagacggcgactgcagcaagggcttcttcctggtgagcctgctggtggagatcgccgccgccagcgccatcaaggtgtag

SEQ ID NO: 242 - DNA, 1212 bp, Artificial Sequence; identical to SEQ ID NO: 239
  Description of Artificial Sequence: Synthetic Transcript Sequence

SEQ ID NO: 243 - DNA, 144 bp, Artificial Sequence
  Description of Artificial Sequence: Synthetic Transcript Sequence
atggcccacgccatggagaacagctggaccatcagcaaggagtaccacatcgacgaggaggtgggcttcgccctgcccaacccccaggagaacctgcccgacttctacaacgactggatgttcatcgccaagcacctgccctag

SEQ ID NO: 244 - DNA, 1224 bp, Artificial Sequence
  Description of Artificial Sequence: Synthetic Transcript Sequence
atggagccccacagacccaacgtgaagaccgccgtgcccctgagcctggagagctaccacatcagcgaggagtacggcttcctgctgcccgacagcctgaaggagctgcccgaccactacagaccctggatggagatcgccaacaagctgccccagctgatcgacgcccaccagctgcaggcccacgtggacaagatgcccctgctgagctgccagttcctgaagggccacagagagcagagactggcccacctggtgctgagcttcctgaccatgggctacgtgtggcaggagggcgaggcccagcccgccgaggtgctgcccagaaacctggccctgcccttcgtggaggtgagcagaaacctgggcctgccccccatcctggtgcacagcgacctggtgctgaccaactggaccaagaaggaccccgacggcttcctggagatcggcaacctggagaccatcatcagcttccccggcggcgagagcctgcacggcttcatcctggtgaccgccctggtggagaaggaggccgtgcccggcatcaaggccctggtgcaggccaccaacgccatcctgcagcccaaccaggaggccctgctgcaggccctgcagagactgagactgagcatccaggacatcaccaagaccctgggccagatgcacgactacgtggaccccgacatcttctacgccggcatcagaatcttcctgagcggctggaaggacaaccccgccatgcccgccggcctgatgtacgagggcgtgagccaggagcccctgaagtacagcggcggcagcgccgcccagagcaccgtgctgcacgccttcgacgagttcctgggcatcagacacagcaaggagagcggcgacttcctgtacagaatgagagactacatgccccccagccacaaggccttcatcgaggacatccacagcgcccccagcctgagagactacatcctgagcagcggccaggaccacctgctgaccgcctacaaccagtgcgtgcaggccctggccgagctgagaagctaccacatcaccatggtgaccaagtacctgatcaccgccgccgccaaggccaagcacggcaagcccaaccacctgcccggccccccccaggccctgaaggacagaggcaccggcggcaccgccgtgatgagcttcctgaagagcgtgagagacaagaccctggagagcatcctgcaccccagaggctag

SEQ ID NO: 245 - DNA, 1263 bp, Artificial Sequence
  Description of Artificial Sequence: Synthetic Transcript Sequence
atgctgcacttccactactacgacaccagcaacaagatcatggagccccacagacccaacgtgaagaccgccgtgcccctgagcctggagagctaccacatcagcgaggagtacggcttcctgctgcccgacagcctgaaggagctgcccgaccactacagaccctggatggagatcgccaacaagctgccccagctgatcgacgcccaccagctgcaggcccacgtggacaagatgcccctgctgagctgccagttcctgaagggccacagagagcagagactggcccacctggtgctgagcttcctgaccatgggctacgtgtggcaggagggcgaggcccagcccgccgaggtgctgcccagaaacctggccctgcccttcgtggaggtgagcagaaacctgggcctgccccccatcctggtgcacagcgacctggtgctgaccaactggaccaagaaggaccccgacggcttcctggagatcggcaacctggagaccatcatcagcttccccggcggcgagagcctgcacggcttcatcctggtgaccgccctggtggagaaggaggccgtgcccggcatcaaggccctggtgcaggccaccaacgccatcctgcagcccaaccaggaggccctgctgcaggccctgcagagactgagactgagcatccaggacatcaccaagaccctgggccagatgcacgactacgtggaccccgacatcttctacgccggcatcagaatcttcctgagcggctggaaggacaaccccgccatgcccgccggcctgatgtacgagggcgtgagccaggagcccctgaagtacagcggcggcagcgccgcccagagcaccgtgctgcacgccttcgacgagttcctgggcatcagacacagcaaggagagcggcgacttcctgtacagaatgagagactacatgccccccagccacaaggccttcatcgaggacatccacagcgcccccagcctgagagactacatcctgagcagcggccaggaccacctgctgaccgcctacaaccagtgcgtgcaggccctggccgagctgagaagctaccacatcaccatggtgaccaagtacctgatcaccgccgccgccaaggccaagcacggcaagcccaaccacctgcccggccccccccaggccctgaaggacagaggcaccggcggcaccgccgtgatgagcttcctgaagagcgtgagagacaagaccctggagagcatcctgcaccccagaggctag

SEQ ID NO: 246 - DNA, 537 bp, Artificial Sequence
  Description of Artificial Sequence: Synthetic Transcript Sequence
atgcacagcagcgccctgctgtgctgcctggtgctgctgaccggcgtgagagccagccccggccagggcacccagagcgagaacagctgcacccacttccccggcaacctgcccaacatgctgagagacctgagagacgccttcagcagagtgaagaccttcttccagatgaaggaccagctggacaacctgctgctgaaggagagcctgctggaggacttcaagggctacctgggctgccaggccctgagcgagatgatccagttctacctggaggaggtgatgccccaggccgagaaccaggaccccgacatcaaggcccacgtgaacagcctgggcgagaacctgaagaccctgagactgagactgagaagatgccacagattcctgccctgcgagaacaagagcaaggccgtggagcaggtgaagaacgccttcaacaagctgcaggagaagggcatctacaaggccatgagcgagttcgacatcttcatcaactacatcgaggcctacatgaccatgaagatcagaaactag

SEQ ID NO: 247 - DNA, 762 bp, Artificial Sequence
  Description of Artificial Sequence: Synthetic Transcript Sequence
atgtggccccccggcagcgccagccagcccccccccagccccgccgccgccaccggcctgcaccccgccgccagacccgtgagcctgcagtgcagactgagcatgtgccccgccagaagcctgctgctggtggccaccctggtgctgctggaccacctgagcctggccagaaacctgcccgtggccacccccgaccccggcatgttcccctgcctgcaccacagccagaacctgctgagagccgtgagcaacatgctgcagaaggccagacagaccctggagttctacccctgcaccagcgaggagatcgaccacgaggacatcaccaaggacaagaccagcaccgtggaggcctgcctgcccctggagctgaccaagaacgagagctgcctgaacagcagagagaccagcttcatcaccaacggcagctgcctggccagcagaaagaccagcttcatgatggccctgtgcctgagcagcatctacgaggacctgaagatgtaccaggtggagttcaagaccatgaacgccaagctgctgatggaccccaagagacagatcttcctggaccagaacatgctggccgtgatcgacgagctgatgcaggccctgaacttcaacagcgagaccgtgccccagaagagcagcctggaggagcccgacttctacaagaccaagatcaagctgtgcatcctgctgcacgccttcagaatcagagccgtgaccatcgacagagtgatgagctacctgaacgccagctag

SEQ ID NO: 248 - DNA, 720 bp, Artificial Sequence
  Description of Artificial Sequence: Synthetic Transcript Sequence
atgtggccccccggcagcgccagccagcccccccccagccccgccgccgccaccggcctgcaccccgccgccagacccgtgagcctgcagtgcagactgagcatgtgccccgccagaagcctgctgctggtggccaccctggtgctgctggaccacctgagcctggccagaaacctgcccgtggccacccccgaccccggcatgttcccctgcctgcaccacagccagaacctgctgagagccgtgagcaacatgctgcagaaggccagacagaccctggagttctacccctgcaccagcgaggagatcgaccacgaggacatcaccaaggacaagaccagcaccgtggaggcctgcctgcccctggagctgaccaagaacggcagctgcctggccagcagaaagaccagcttcatgatggccctgtgcctgagcagcatctacgaggacctgaagatgtaccaggtggagttcaagaccatgaacgccaagctgctgatggaccccaagagacagatcttcctggaccagaacatgctggccgtgatcgacgagctgatgcaggccctgaacttcaacagcgagaccgtgccccagaagagcagcctggaggagcccgacttctacaagaccaagatcaagctgtgcatcctgctgcacgccttcagaatcagagccgtgaccatcgacagagtgatgagctacctgaacgccagctag

SEQ ID NO: 249 - DNA, 648 bp, Artificial Sequence
  Description of Artificial Sequence: Synthetic Transcript Sequence
atgtggccccccggcagcgccagccagcccccccccagccccgccgccgccaccggcctgcaccccgccgccagacccgtgagcctgcagtgcagactgagcatgtgccccgccagaagcctgctgctggtggccaccctggtgctgctggaccacctgagcctggccagaaacctgcccgtggccacccccgaccccggcatgttcccctgcctgcaccacagccagaacctgctgagagccgtgagcaacatgctgcagaagaacgagagctgcctgaacagcagagagaccagcttcatcaccaacggcagctgcctggccagcagaaagaccagcttcatgatggccctgtgcctgagcagcatctacgaggacctgaagatgtaccaggtggagttcaagaccatgaacgccaagctgctgatggaccccaagagacagatcttcctggaccagaacatgctggccgtgatcgacgagctgatgcaggccctgaacttcaacagcgagaccgtgccccagaagagcagcctggaggagcccgacttctacaagaccaagatcaagctgtgcatcctgctgcacgccttcagaatcagagccgtgaccatcgacagagtgatgagctacctgaacgccagctag

SEQ ID NO: 250 - DNA, 429 bp, Artificial Sequence
  Description of Artificial Sequence: Synthetic Transcript Sequence
atgagcctgctgcccgtgccctacaccgaggccgccagcctgagcaccggcagcaccgtgaccatcaagggcagacccctggcctgcttcctgaacgagccctacctgcaggtggacttccacaccgagatgaaggaggagagcgacatcgtgttccacttccaggtgtgcttcggcagaagagtggtgatgaacagcagagagtacggcgcctggaagcagcaggtggagagcaagaacatgcccttccaggacggccaggagttcgagctgagcatcagcgtgctgcccgacaagtaccaggtgatggtgaacggccagagcagctacaccttcgaccacagaatcaagcccgaggccgtgaagatggtgcaggtgtggagagacatcagcctgaccaagttcaacgtgagctacctgaagagatag

SEQ ID NO: 251 - DNA, 657 bp, Artificial Sequence
  Description of Artificial Sequence: Synthetic Transcript Sequence
atgagcttcgtgggcgagaacagcggcgtgaagatgggcagcgaggactgggagaaggacgagccccagtgctgcctggaggaccccgccggcagccccctggagcccggccccagcctgcccaccatgaacttcgtgcacaccagccccaaggtgaagaacctgaaccccaagaagttcagcatccacgaccaggaccacaaggtgctggtgctggacagcggcaacctgatcgccgtgcccgacaagaactacatcagacccgagatcttcttcgccctggccagcagcctgagcagcgccagcgccgagaagggcagccccatcctgctgggcgtgagcaagggcgagttctgcctgtactgcgacaaggacaagggccagagccaccccagcctgcagctgaagaaggagaagctgatgaagctggccgcccagaaggagagcgccagaagacccttcatcttctacagagcccaggtgggcagctggaacatgctggagagcgccgcccaccccggctggttcatctgcaccagctgcaactgcaacgagcccgtgggcgtgaccgacaagttcgagaacagaaagcacatcgagttcagcttccagcccgtgtgcaaggccgagatgagccccagcgaggtgagcgactag

SEQ ID NO: 252 - DNA, 579 bp, Artificial Sequence
  Description of Artificial Sequence: Synthetic Transcript Sequence
atgagcggctgcgacagaagagagaccgagaccaagggcaagaacagcttcaagaagagactgagaggccccaaggtgaagaacctgaaccccaagaagttcagcatccacgaccaggaccacaaggtgctggtgctggacagcggcaacctgatcgccgtgcccgacaagaactacatcagacccgagatcttcttcgccctggccagcagcctgagcagcgccagcgccgagaagggcagccccatcctgctgggcgtgagcaagggcgagttctgcctgtactgcgacaaggacaagggccagagccaccccagcctgcagctgaagaaggagaagctgatgaagctggccgcccagaaggagagcgccagaagacccttcatcttctacagagcccaggtgggcagctggaacatgctggagagcgccgcccaccccggctggttcatctgcaccagctgcaactgcaacgagcccgtgggcgtgaccgacaagttcgagaacagaaagcacatcgagttcagcttccagcccgtgtgcaaggccgagatgagccccagcgaggtgagcgactag

SEQ ID NO: 253 - DNA, 474 bp, Artificial Sequence
  Description of Artificial Sequence: Synthetic Transcript Sequence
atgagcttcgtgggcgagaacagcggcgtgaagatgggcagcgaggactgggagaaggacgagccccagtgctgcctggaggagatcttcttcgccctggccagcagcctgagcagcgccagcgccgagaagggcagccccatcctgctgggcgtgagcaagggcgagttctgcctgtactgcgacaaggacaagggccagagccaccccagcctgcagctgaagaaggagaagctgatgaagctggccgcccagaaggagagcgccagaagacccttcatcttctacagagcccaggtgggcagctggaacatgctggagagcgccgcccaccccggctggttcatctgcaccagctgcaactgcaacgagcccgtgggcgtgaccgacaagttcgagaacagaaagcacatcgagttcagcttccagcccgtgtgcaaggccgagatgagccccagcgaggtgagcgactag

SEQ ID NO: 254 - DNA, 594 bp, Artificial Sequence
  Description of Artificial Sequence: Synthetic Transcript Sequence
atgagcttcgtgggcgagaacagcggcgtgaagatgggcagcgaggactgggagaaggacgagccccagtgctgcctggagggccccaaggtgaagaacctgaaccccaagaagttcagcatccacgaccaggaccacaaggtgctggtgctggacagcggcaacctgatcgccgtgcccgacaagaactacatcagacccgagatcttcttcgccctggccagcagcctgagcagcgccagcgccgagaagggcagccccatcctgctgggcgtgagcaagggcgagttctgcctgtactgcgacaaggacaagggccagagccaccccagcctgcagctgaagaaggagaagctgatgaagctggccgcccagaaggagagcgccagaagacccttcatcttctacagagcccaggtgggcagctggaacatgctggagagcgccgcccaccccggctggttcatctgcaccagctgcaactgcaacgagcccgtgggcgtgaccgacaagttcgagaacagaaagcacatcgagttcagcttccagcccgtgtgcaaggccgagatgagccccagcgaggtgagcgactag

SEQ ID NO: 255 - DNA, 537 bp, Artificial Sequence
  Description of Artificial Sequence: Synthetic Transcript Sequence
atgagcttcgtgggcgagaacagcggcgtgaagatgggcagcgaggactgggagaaggacgagccccagtgctgcctggaggaccccgccggcagccccctggagcccggccccagcctgcccaccatgaacttcgtgcacaccaagatcttcttcgccctggccagcagcctgagcagcgccagcgccgagaagggcagccccatcctgctgggcgtgagcaagggcgagttctgcctgtactgcgacaaggacaagggccagagccaccccagcctgcagctgaagaaggagaagctgatgaagctggccgcccagaaggagagcgccagaagacccttcatcttctacagagcccaggtgggcagctggaacatgctggagagcgccgcccaccccggctggttcatctgcaccagctgcaactgcaacgagcccgtgggcgtgaccgacaagttcgagaacagaaagcacatcgagttcagcttccagcccgtgtgcaaggccgagatgagccccagcgaggtgagcgactag

SEQ ID NO: 256 - DNA, 1344 bp, Artificial Sequence
  Description of Artificial Sequence: Synthetic Transcript Sequence
atgatccccaccttcaccgccctgctgtgcctgggcctgagcctgggccccagaacccacatgcaggccggccccctgcccaagcccaccctgtgggccgagcccggcagcgtgatcagctggggcaacagcgtgaccatctggtgccagggcaccctggaggccagagagtacagactggacaaggaggagagccccgccccctgggacagacagaaccccctggagcccaagaacaaggccagattcagcatccccagcatgaccgaggactacgccggcagatacagatgctactacagaagccccgtgggctggagccagcccagcgaccccctggagctggtgatgaccggcgcctacagcaagcccaccctgagcgccctgcccagccccctggtgaccagcggcaagagcgtgaccctgctgtgccagagcagaagccccatggacaccttcctgctgatcaaggagagagccgcccaccccctgctgcacctgagaagcgagcacggcgcccagcagcaccaggccgagttccccatgagccccgtgaccagcgtgcacggcggcacctacagatgcttcagcagccacggcttcagccactacctgctgagccaccccagcgaccccctggagctgatcgtgagcggcagcctggaggaccccagacccagccccaccagaagcgtgagcaccgccgccggccccgaggaccagcccctgatgcccaccggcagcgtgccccacagcggcctgagaagacactgggaggtgctgatcggcgtgctggtggtgagcatcctgctgctgagcctgctgctgttcctgctgctgcagcactggagacagggcaagcacagaaccctggcccagagacaggccgacttccagagaccccccggcgccgccgagcccgagcccaaggacggcggcctgcagagaagaagcagccccgccgccgacgtgcagggcgagaacttctgcgccgccgtgaagaacacccagcccgaggacggcgtggagatggacaccagaagcccccacgacgaggacccccaggccgtgacctacgccaaggtgaagcacagcagacccagaagagagatggccagcccccccagccccctgagcggcgagttcctggacaccaaggacagacaggccgaggaggacagacagatggacaccgaggccgccgccagcgaggccccccaggacgtgacctacgcccagctgcacagcttcaccctgagacagaaggccaccgagcccccccccagccaggagggcgccagccccgccgagcccagcgtgtacgccaccctggccatccactag

SEQ ID NO: 257 - DNA, 636 bp, Artificial Sequence
  Description of Artificial Sequence: Synthetic Transcript Sequence
atggtggcccacaaccaggtggccgccgacaacgccgtgagcaccgccgccgagcccagaagaagacccgagcccagcagcagcagcagcagcagccccgccgcccccgccagacccagaccctgccccgccgtgcccgcccccgcccccggcgacacccacttcagaaccttcagaagccacgccgactacagaagaatcaccagagccagcgccctgctggacgcctgcggcttctactggggccccctgagcgtgcacggcgcccacgagagactgagagccgagcccgtgggcaccttcctggtgagagacagcagacagagaaactgcttcttcgccctgagcgtgaagatggccagcggccccaccagcatcagagtgcacttccaggccggcagattccacctggacggcagcagagagagcttcgactgcctgttcgagctgctggagcactacgtggccgcccccagaagaatgctgggcgcccccctgagacagagaagagtgagacccctgcaggagctgtgcagacagagaatcgtggccaccgtgggcagagagaacctggccagaatccccctgaaccccgtgctgagagactacctgagcagcttccccttccagatctag

SEQ ID NO: 258 - DNA, 1596 bp, Artificial Sequence
  Description of Artificial Sequence: Synthetic Transcript Sequence
atggccgccaccctggacctgaagagcaaggaggagaaggacgccgagctggacaagagaatcgaggccctgagaagaaagaacgaggccctgatcagaagataccaggagatcgaggaggacagaaagaaggccgagctggagggcgtggccgtgaccgcccccagaaagggcagaagcgtggagaaggagaacgtggccgtggagagcgagaagaacctgggccccagcagaagaagccccggcacccccagaccccccggcgccagcaagggcggcagaacccccccccagcagggcggcagagccggcatgggcagagccagcagaagctgggagggcagccccggcgagcagcccagaggcggcggcgccggcggcagaggcagaagaggcagaggcagaggcagcccccacctgagcggcgccggcgacaccagcatcagcgacagaaagagcaaggagtgggaggagagaagaagacagaacatcgagaagatgaacgaggagatggagaagatcgccgagtacgagagaaaccagagagagggcgtgctggagcccaaccccgtgagaaacttcctggacgaccccagaagaagaagcggccccctggaggagagcgagagagacagaagagaggagagcagaagacacggcagaaactggggcggccccgacttcgagagagtgagatgcggcctggagcacgagagacagggcagaagagccggcctgggcagcgccggcgacatgaccctgagcatgaccggcagagagagaagcgagtacctgagatggaagcaggagagagagaagatcgaccaggagagactgcagagacacagaaagcccaccggccagtggagaagagagtgggacgccgagaagaccgacggcatgttcaaggacggccccgtgcccgcccacgagcccagccacagatacgacgaccaggcctgggccagaccccccaagccccccaccttcggcgagttcctgagccagcacaaggccgaggccagcagcagaagaagaagaaagagcagcagaccccaggccaaggccgcccccagagcctacagcgaccacgacgacagatgggagaccaaggagggcgccgccagccccgcccccgagaccccccagcccaccagccccgagaccagccccaaggagacccccatgcagccccccgagatccccgcccccgcccacagaccccccgaggacgagggcgaggagaacgagggcgaggaggacgaggagtgggaggacatcagcgaggacgaggaggaggaggagatcgaggtggaggagggcgacgaggaggagcccgcccaggaccaccaggcccccgaggccgcccccaccggcatcccctgcagcgagcaggcccacggcgtgcccttcagccccgaggagcccctgctggagccccaggcccccggcacccccagcagccccttcagcccccccagcggccaccagcccgtgagcgactggggcgaggaggtggagctgaacagccccagaaccacccacctggccggcgccctgagccccggcgaggcctggcccttcgagagcgtgtag

SEQ ID NO: 259 - DNA, 531 bp, Artificial Sequence
  Description of Artificial Sequence: Synthetic Transcript Sequence
atgcggatctttgcagtgtttattttcatgacttattggcaccttttgaacgctccttacaataagattaatcagcggatactcgtcgtggatcccgtaacaagtgaacacgagctgacatgtcaggctgaagggtaccctaaggctgaggttatctggacatccagcgaccaccaggtgctatcaggaaaaacaactaccacaaatagcaagcgcgaggagaagcttttcaatgtgacatctacactgcgaattaatacgacaacgaatgagattttttactgtacattcagaagacttgatccggaggagaatcacacagccgagctcgttattccggagctgccactggcacatccgcccaacgagcgcacacacctagttattctcggcgctatacttctttgtcttggtgtagcattaacctttatcttccgcctacgcaaaggccgcatgatggatgtcaagaagtgcgggatccaagatacgaattcgaaaaaacagtccgacacccacctcgaagaaacttag

SEQ ID NO: 260 - DNA, 873 bp, Artificial Sequence
  Description of Artificial Sequence: Synthetic Transcript Sequence
atgaggatctttgcggtgttcatattcatgacctactggcacctgctgaatgcattcacagtcaccgtacccaaagacctatacgtggttgagtatggctccaacatgaccattgaatgtaagtttcctgttgagaaacagctcgatctggccgccctgattgtttattgggagatggaggacaaaaatatcattcaattcgtgcacggcgaggaggatttaaaagttcaacactccagttatcgtcaaagggcccgtctcctcaaggatcaattatccctgggaaacgcggccctccagattacggatgtcaaactacaagacgccggggtttacagatgcatgatatcatatggtggggccgactacaaacggatcactgtgaaggtcaatgctccatacaacaaaatcaatcaacgtatcctggtggtggacccagtcacatctgagcatgaactgacttgccaggctgagggatatcctaaagccgaggtaatttggaccagttcagaccaccaagtcctgtctggcaagacaacgaccacaaattctaaacgtgaagagaagcttttcaatgtcacaagtacattgcgtatcaatactactaccaatgagatcttctattgtacctttcgccgactggatccagaggaaaatcacaccgcagagttagtgatccccgaactgccacttgcacatccacctaacgagagaacccacctcgtcattctaggtgctattctcctgtgcctcggggtcgcattgacattcatcttcagattgaggaaagggaggatgatggacgtcaagaaatgtgggatccaggacacaaactcgaaaaaacaatccgacactcaccttgaagaaacttag

SEQ ID NO: 261 - DNA, 612 bp, Artificial Sequence
  Description of Artificial Sequence: Synthetic Transcript Sequence
atggtacggctgcccctacagtgtgtcctctggggttgcctgctgacagcagtgcacccagagccgcccaccgcatgccgggaaaagcaataccttatcaactcgcaatgctgctccttgtgccagcccggtcagaaacttgtatcagactgcactgagttcaccgaaaccgagtgcttaccatgcggggaatctgaattcctcgatacatggaaccgagagacacattgtcatcagcataagtactgtgacccaaacctaggattacgcgtccagcagaaaggaacctcagaaacggacactatctgtacatgcgaagagggatggcactgtacctcagaagcatgcgagagttgtgtgctccaccgtagttgttctcccggctttggcgtgaagcaaatcgcgactggggtatctgacaccatttgtgaaccatgtccagtcggtttctttagcaatgtttcttctgcgttcgagaaatgtcacccctggacgcgatcccccggctctgcggaaagccctggcggcgatcctcatcaccttcgagatccagtgtgccatccactgggcgcgggtctttatcaaaaaggcggacaggaggccaaccagtag

SEQ ID NO: 262 - DNA, 786 bp, Artificial Sequence
  Description of Artificial Sequence: Synthetic Transcript Sequence
ggccgctcaccccttagaacacgcgatcgggttctgacaaattgggaggatgggttgaccgtcgcttatggggcagtgaagctgattcagagcctgtctttgcaacccgtcgggtggcagcagaactggggactgtcaagccctcccacaatgctgctgccctccagagctcagtcccccactgagctgcccctggcccctttagcagaacctaacaccggctgttcttcgctgctgtcttggcacagcacccgaggcgaactgcatctatgggctttgggcctggggcagatgggtggctccaagtgtgggagtccactcagtcccttagcccctacgttggaggcactgcgacgaccctggtgcggccagcaaggtgctggcggcactcggggcatttcgaccgatccaccaagcggtaagggagggagagcatggggccgcgatccccttccacgggaaggactactgagaggtaccgccgccccagctgctgggggagatctaacaccttgcctgtctagaccacccacacctagtagaaatcctcgccggagtatattcccgacaatctttctggctccaacactgctactacagtgccggcgtctgtatatggacgccaatagaagtccacgcagaatggcgaagagggtcgcctctcaatgccgtagggattcagaggccgcccccacacaggagtgcggccatgtgggtaagcaggctgtcggacagcgtgcctggtgctgctgttgctgcggagttagggtgaggggatggcactag

SEQ ID NO: 263 - DNA, 834 bp, Artificial Sequence
  Description of Artificial Sequence: Synthetic Transcript Sequence
atggtaagattaccactgcagtgtgttctgtggggctgcttgcttacagccgtgcatccagagccccctacagcgtgcagagaaaagcagtatctcattaattcacagtgctgctcactctgccagccggggcagaagcttgtgtctgattgtacggaatttaccgaaacagaatgcctcccttgcggggaatcggagtttctggacacctggaacagagagacacattgccaccagcataaatactgtgatccaaacttgggcctgcgtgtgcagcaaaaaggcacctcagaaaccgacacaatttgtacatgtgaagaaggctggcactgcacatctgaggcgtgtgagtcctgtgtgctgcaccgtagctgttctcctgggttcggagtcaagcagattgccaccggcgtaagtgatactatctgcgagccatgccccgtgggtttctttagcaacgtgtcttccgctttcgaaaagtgtcatccttggacaagttgtgagactaaggatttggtggttcagcaagcaggcacaaacaaaactgatgtggtgtgcgggcctcaggatcgcctgagggccttggtggttatcccaattattttcgggattctgttcgcgatcctccttgtgcttgttttcatcaaaaaggttgccaaaaaaccaactaataaagcgccccacccaaagcaagaacctcaggaaatcaacttcccagacgacctgcctggctccaatacagcagcgccagtgcaggagactcttcacgggtgtcaaccagtgacccaggaagacggcaaggagagcagaattagtgttcaggaaaggcagtag

SEQ ID NO: 264 - DNA, 723 bp, Artificial Sequence
  Description of Artificial Sequence: Synthetic Transcript Sequence
atgatcgagacttacaaccagaccagccctcggagcgccgctaccggtctaccgatcagcatgaagatcttcatgtatctcctaacagtgttcctgattacacagatgattggctcggccctcttcgcggtctacctgcaccgccgcctagacaagattgaggatgagagaaatcttcacgaggattttgtgttcatgaagaccattcagcggtgtaacacaggggagagatcactttcactgctgaattgtgaagaaatcaagagccagtttgaaggattcgtgaaggacattatgttaaacaaggaagaaacaaaaaaagagaacagcttcgaaatgcaaaaggtgttacagtgggccgagaaagggtattacacaatgtcaaacaacttggtgacacttgagaacggtaaacagctgacagtcaaacggcagggtctgtattatatctatgcccaggtcacattttgctctaacagggaggcctcgtcacaggccccattcatcgccagcctatgtctgaaaagcccgggccgcttcgagaggatactgttgagggctgctaatacacatagttctgctaaaccctgcggtcagcagtccatccacctgggcggcgtgtttgaacttcaaccgggcgcatccgtatttgtcaacgtgacggatccatcccaagtttcacacggaactgggttcacaagttttggcctgctcaaactctag

SEQ ID NO: 265 - DNA, 786 bp, Artificial Sequence
  Description of Artificial Sequence: Synthetic Transcript Sequence
atgatcgagacatataaccagacctccccaagatccgcagctaccgggctgcctatcagcatgaaaatctttatgtacttgttaacggtgtttttgatcacgcagatgatcggaagcgccctctttgcagtgtatctgcatagaaggcttgacaaaattgaagatgagagaaatctgcacgaagacttcgtgtttatgaaaaccatccaacggtgtaacaccggggagcggtctcttagcctgctgaattgcgaagagattaagagccaatttgagggttttgtgaaagacatcatgctgaacaaagaggaaaccaagaaagaaaactctttcgagatgcagaaaggtgaccagaaccctcagatcgccgcccacgtgatctctgaggccagttccaagactacatctgtgctccaatgggccgaaaaaggctactacactatgtccaataacttggtgaccctagagaacggaaagcaactgaccgtgaaacggcagggactgtactacatttacgcccaggtgacgttctgctccaaccgcgaagccagttctcaggctccttttatcgccagtctttgcctcaaaagccccgggcgattcgaaagaatcctgttgagggcagcaaacacacactcatccgctaaaccttgcgggcagcaatcgatccatcttggcggagtctttgaactgcagcccggcgcctctgtattcgtgaacgtcacggacccaagccaggtgagccatggaacagggtttacatcatttggactgctaaagctgtag

SEQ ID NO: 266 - DNA, 5169 bp, Artificial Sequence
  Description of Artificial Sequence: Synthetic Transcript Sequence
atgcggactggctgggcaacacctagaaggcccgccgggctccttatgctgctgttctggttcttcgatttggccgaaccaagtggtagagcagcaaatgatccttttaccatcgtccacggcaacacaggcaaatgcattaaacccgtctacggatggatcgtcgccgacgattgcgatgaaaccgaggacaagctttggaagtgggtttcccagcatagattgttccatctgcattcacagaagtgccttggtctggacattacgaaatctgtcaatgagctgaggatgttctcatgcgattcttctgccatgctatggtggaagtgtgagcaccactccctttacggtgccgcgaggtaccgcctggctcttaaagacggacatgggacggctattagtaatgctagtgatgtttggaagaaagggggcagcgaagaaagtttatgtgaccagccatatcatgagatctacactagagatgggaattcatatggacggccctgtgagtttccttttctgatcgatggtacatggcaccacgactgcatcctggatgaggatcactcaggaccctggtgcgccactactctcaattatgaatatgatagaaagtggggtatctgcttgaagccagagaacggatgcgaggataactgggagaagaacgagcagttcgggtcttgctatcagttcaacacacagacagcccttagctggaaagaggcctacgtgtcctgccaaaatcagggcgccgatttgttaagcatcaattccgcggcagagctcacatacctgaaagaaaaggagggtattgcaaagatcttctggatagggctgaatcagctttactctgcccggggctgggagtggtcagatcataagcctctcaatttcctcaattgggaccctgataggccctccgcccctaccatcggtggctcctcttgcgcgcggatggacgcggaatcaggcttatggcagtctttcagctgtgaggcacagttaccgtatgtgtgtcggaaacccctcaataacacagtagaactaaccgacgtgtggacgtattcagataccagatgcgacgctggctggcttcctaacaacggcttctgctacctgctggtgaacgagtccaacagttgggacaaggcacatgccaaatgcaaggccttctcctctgacttgattagcatccacagtctcgcagatgtggaagtggtagtgaccaagttgcacaatgaagacattaaagaagaggtgtggatcggccttaaaaatattaatattcccaccttatttcagtggtctgacggaaccgaggttacactgacatactgggatgagaacgagcctaatgttccatacaacaaaacaccaaattgtgtgtcatacctgggcgagcttgggcaatggaaggtccagtcctgtgaggagaaactgaagtatgtgtgtaaaaggaagggcgagaagctgaacgatgcgagttctgacaaaatgtgcccccctgacgaaggctggaaacgtcatggggagacctgctacaagatatatgaagatgaggtaccctttggcacaaattgcaacctaaccatcaccagtaggtttgagcaggaatatctcaatgacctcatgaaaaagtacgacaaaagtcttaggaaatatttttggacaggcttaagggatgtggactcttgcggcgagtacaactgggccaccgttgggggccggcgccgggccgtgaccttttccaactggaatttcttagaaccggcttccccagggggttgtgtggccatgtctacaggaaaaagtgtaggaaagtgggaagtaaaggactgtaggagcttcaaagccttaagcatctgcaaaaagatgtctggacctctcgggcccgaggaggcttcacctaagcccgacgatccatgcccagaaggatggcagagctttcccgcctcactgagttgttacaaggtctttcacgctgaacggatcgttcggaagagaaactgggaggaagcggagaggttctgtcaagccctcggggcccacttatcttccttctcccatgtggacgaaataaaagaattccttcactttttaacagaccagttctccggacaacactggctgtggatcgggctaaacaagaggagccccgacctccagggctcttggcagtggagcgacagaacccctgtcagcaccataatcatgccaaacgagttccaacaggattacgatattcgcgattgcgccgccgtgaaggtttttcacagaccttggcggaggggatggcatttttacgatgacagggaatttatttacctgaggccgtttgcttgcgatactaaattggaatgggtgtgtcagatcccaaaaggccgcactcccaaaactccagactggtataatcccgaccgcgcggggattcacggcccgcctttgatcattgaaggatcggagtactggttcgtggccgatctgcatttgaactacgaggaggccgtgctctactgtgccagcaatcattcctttctggccaccataaccagttttgttggcctaaaagccattaaaaacaagatcgcaaacattagcggagatggtcaaaagtggtggattcggatctccgagtggccaatcgatgaccatttcacttactcaagatacccctggcaccggtttcccgttacttttggggaagaatgtctgtacatgtcggcgaagacttggttaattgacctgggcaaacctaccgactgctctacaaagctgccattcatctgtgagaagtacaacgtgagctctcttgaaaaatactcacccgatagcgctgccaaggtgcagtgcagtgaacagtggatcccttttcagaataagtgctttctgaaaatcaagccagttagtcttaccttctcacaggcctccgacacttgccactcgtacgggggtacactaccaagtgtgttgtcccagatcgagcaggacttcatcacttcgctgctccccgacatggaggcaactctgtggattggtcttcgctggactgcctacgaaaaaatcaacaagtggacggacaacagagaactgacttacagcaatttccacccgctgcttgtttctgggaggctgcggatccccgagaacttctttgaagaagagagtcgttaccattgcgccctgatacttaatttgcaaaaaagcccttttacgggcacatggaactttacgtcttgtagcgaaagacacttcgtgtccttatgtcagaagtattctgaggtgaaaagccgccagacattacaaaatgcttcagaaacggtcaagtacctcaataatttgtacaaaattattcccaaaaccctgacctggcactccgccaaaagagagtgtctgaagagcaacatgcaactggtttctataacagatccataccagcaggcattcctgagtgttcaggcgctgttgcacaattcctctttgtggatcgggctcttttcgcaggacgacgagctcaacttcggatggagcgatggaaagcgactccatttttcaagatgggccgagaccaacggacagttggaagattgcgttgtgttggatacggatggtttctggaaaaccgttgattgcaacgataatcagccaggagcaatctgctactacagcggcaacgagactgagaaagaggtgaagccagtggattccgtaaagtgcccctccccggttttaaacaccccatggatcccctttcagaattgctgttacaatttcataattaccaagaaccgccacatggcaaccacacaggacgaggtccataccaaatgccaaaaactcaacccgaagagccatatcctctctatccgcgatgagaaggagaataatttcgtccttgaacagcttctgtactttaattatatggcatcgtgggtgatgctcggcattacgtaccggaataaaagtctaatgtggtttgataagacaccgctgagttatactcattggagagccggacggcctacaatcaagaatgagaagttcctagcaggactgtccaccgacggcttctgggacatccagacattcaaagtaatagaagaggcggtttattttcaccaacacagtatcttggcatgtaaaatcgagatggtcgattacaaagaggaatataacacgactctgccccagtttatgccttacgaggatggaatctactcagtgatacaaaagaaagtcacatggtacgaggccttaaacatgtgctctcagagcgggggacacttggcaagcgtgcataaccagaacggtcaactcttccttgaagacatcgtgaaaagagatggttttcctttgtgggtgggactaagcagccatgacggaagcgaaagctctttcgagtggtctgatggcagtacattcgattacatcccatggaaagggcaaacctcacccggcaattgcgtcctgttagatccgaagggaacctggaagcacgagaagtgtaacagtgtcaaggacggcgcgatctgttataaacccactaagagcaaaaaactctctcgcctgacctacagctctagatgcccggctgccaaagagaatggatctagatggatacagtacaaaggacattgctacaagtctgatcaggcactccactccttctcagaagccaaaaaattgtgctccaagcatgatcactccgccactatagttagcatcaaggacgaggatgagaacaagttcgtgtcgcgcctcatgcgggaaaataacaatattaccatgcgcgtttggctgggtctctcacagcattcagttgaccaaagttggtcatggctggatggcagtgaggtgacatttgtgaagtgggagaacaagtctaagagcggcgtggggagatgcagcatgcttattgcatcgaacgagacatggaagaaggttgagtgcgaacatggttttggtcgagtggtttgcaaggtgccactcggtccggactacaccgccattgcaataatagtagcgaccttgagtatcttggtcctcatgggcggactgatctggtttcttttccaacggcaccgcctacacctcgccggcttttctagcgtccgttatgcacagggcgtcaatgaagacgaaatcatgctgccttccttccacgattag

SEQ ID NO: 267 - DNA, 5454 bp, Artificial Sequence
  Description of Artificial Sequence: Synthetic Transcript Sequence
atgcgcaccggatgggccacccccagaaggcctgccggtctccttatgctccttttctggttcttcgatctggcagaaccttctggacgagcggctaacgatccttttactatagtgcacggtaacacgggcaagtgcataaaacctgtgtacggatggatagtggccgacgattgcgatgaaacggaggacaaactgtggaagtgggtttcccagcatagactgttccaccttcatagccaaaaatgtttgggcctggatataaccaaatcagtaaacgagctccgaatgtttagctgcgactccagtgccatgctatggtggaagtgcgagcaccactctttatacggggcggctcgttatagactggccttaaaagacggccacggcacagccatttctaacgcctccgacgtctggaagaaagggggaagcgaagaatctctctgcgaccagccctaccatgaaatatatacccgtgatgggaacagctatggcagaccctgcgagtttccattcctaattgacggtacatggcatcacgactgtatactcgatgaggaccactcaggtccttggtgcgcaacaacacttaattatgaatacgatcgcaagtggggtatttgcctgaaacccgagaacgggtgcgaagacaattgggaaaagaatgaacagttcggatcttgctaccagtttaacactcagacagccctgagctggaaagaggcatatgtgtcctgtcagaaccagggcgctgatctgctatcaatcaactctgccgctgagctcacgtacttgaaagagaaggagggtatcgctaagatattctggatcggcttgaaccaattgtactcggcaaggggatgggagtggagcgaccataaacctctcaacttcctgaattgggacccagataggccttccgccccaacaattggggggagtagttgcgctaggatggatgccgagagtggtttatggcagagcttttcctgcgaggcgcagctgccctacgtttgccgcaagccactcaacaacacggtcgagctcacggacgtatggacttactctgatacccgttgtgacgccggatggctgccaaacaatgggttctgctatctcttagtgaacgaatctaactcttgggataaagcccatgccaagtgtaaggcgttttcatcagacttaatttctatccacagcctggccgacgtggaggtagtcgtcacaaaactacataatgaggatataaaggaggaggtttggataggcttaaaaaatatcaacattcctaccctctttcagtggtctgatggcacggaagtgactctgacatattgggacgagaacgagcccaatgtgccatataacaaaaccccgaactgcgtgtcttacctaggagaactgggccagtggaaagtgcagtcctgcgaagagaagctcaagtacgtatgcaagcgtaagggtgagaaactcaatgatgctagttcagacaagatgtgtcctcccgatgagggttggaagcgccacggggagacttgctacaagatatacgaggacgaggtacctttcggtacgaattgcaacctgacaattacctcacggttcgaacaggagtatcttaacgacctgatgaagaagtatgataagtctttgcgaaagtacttttggacagggctgcgcgatgtggacagctgcggcgagtataattgggcaactgttggtggcaggagaagggcagtgacattttcaaactggaactttttggagccggctagccccgggggctgtgtggccatgtccaccggcaagtccgttggaaaatgggaagtgaaggattgccggtcctttaaagccctgtccatatgcaagaaaatgagcggcccactcggccccgaggaagcttcacccaagccagacgacccttgtccggaaggctggcaatcatttcccgccagtcttagctgttacaaggtcttccacgccgaaaggatcgtaaggaagcggaattgggaagaggcagaacgattttgtcaggccctgggagcccatttgagttctttctcacatgtcgacgagattaaagaattcctgcacttcctcaccgatcagttttcgggccagcactggttgtggatcggactgaacaagcgcagccccgatttacagggtagctggcaatggtctgaccggacgccagtgtcaaccattattatgcctaacgaattccagcaggattatgatataagggactgcgccgccgtgaaggtgttccaccggccatggaggcgtggctggcacttttatgatgatcgagaatttatctacctcagaccttttgcctgcgatacaaagctggagtgggtatgtcagattccgaaaggcaggacaccaaaaacccctgattggtacaatcctgatcgcgccggaattcacggcccccctctaattatcgaggggtcagaatactggttcgtggcggacctgcacctgaattacgaagaggccgtgctttattgcgcctctaatcactcattcctggccaccatcacctccttcgtgggactcaaggctattaagaacaaaattgcgaatatatccggagatggtcagaaatggtggattcgaatcagcgaatggcccattgacgatcactttacctacagtcgctatccctggcaccggtttccagtcacgttcggcgaggagtgcctctatatgtctgcaaagacctggttaatcgacctgggtaagccgactgattgttctacaaaactgcctttcatctgcgagaagtacaatgtgtctagcctggagaagtactccccggattctgcggccaaggtgcagtgctcagaacagtggatccccttccaaaacaagtgctttctaaaaattaagccagtgtctctcacgttcagtcaggcctccgacacttgccattcatacgggggtacgttacctagcgtgctgagccaaattgagcaagatttcatcacaagcttgcttcctgatatggaagccactttgtggatcgggcttaggtggacagcctacgagaagatcaataagtggacagacaatagggagctgacctacagcaattttcatccacttcttgtctctggccgattgcgaatccctgagaattttttcgaggaagagtctcgatatcactgtgctttaattctgaacctgcagaagtctcctttcaccggtacttggaacttcactagctgcagcgagaggcatttcgtgtcactgtgtcagaaatacagcgaggtcaagtctagacaaaccctgcaaaacgctagtgagacagttaaataccttaacaatctctataagattattcccaaaacactgacatggcatagtgcaaagcgtgaatgcctgaagagtaatatgcagctagtctctattacggacccctaccagcaggcctttttaagtgtgcaggctctcttacataattccagcctatggatcggcctcttctcacaagatgatgaactaaattttggctggtctgacggaaagcgactccatttctcaagatgggcggagaccaacggccagctggaagactgtgttgtgctagatactgacggcttctggaaaaccgtggactgcaatgacaatcagcccggcgccatctgctattactctggtaacgagaccgagaaggaggtcaaacccgttgattctgtaaaatgtccatcaccggtcctcaacacgccatggattccgttccagaattgctgctacaacttcattatcaccaagaatcgacacatggccactacacaggatgaagttcataccaaatgtcaaaaactgaacccgaaatcgcatattctcagcatcagagatgaaaaggaaaacaacttcgtgctcgagcaattgctgtatttcaactacatggccagctgggtcatgctcggcattacctacagaaacaaatccttgatgtggtttgataagacccctctgtcctacactcactggagagccggccggccgactatcaaaaacgagaaattcctcgcaggcctatctacagacggattttgggacatccagacttttaaagtgattgaagaagcagtttacttccatcaacatagtatcttagcctgcaaaattgagatggtcgactacaaggaagagtataacacaacattaccacaatttatgccatacgaggatggcatctactcagtcatccaaaaaaaggtaacttggtacgaggcactgaatatgtgttcacagtcgggggggcacctcgcctccgtccataaccaaaacggccaactgttcctggaggacatcgttaagcgagatggatttccactttgggtcgggttgagcagccatgacggcagtgagagcagctttgagtggtcagacgggagtactttcgactatatcccctggaaaggccaaactagcccagggaactgcgtcctgctggaccctaagggcacttggaaacacgagaaatgcaactccgtcaaggacggtgctatttgttacaagccaacgaaaagcaagaaactctctcggctcacttattcaagcagatgcccagccgccaaggaaaacggatcgcgctggatccagtacaagggccactgttacaagagcgaccaggcattgcattcctttagcgaggcaaagaaattatgcagtaagcacgaccatagtgcaacaattgtgagcattaaagacgaggacgaaaacaagttcgtcagccgcctgatgagagaaaataacaatatcacaatgagggtgtggctcggcctgagccagcattccgtggactgtccaagtagtacttggatacagttccaggatagctgctacatctttctgcaggaggctattaaggtggagtccatcgaggatgtgaggaaccagtgcactgaccacggggccgacatgattagtattcacaatgaagaagaaaatgctttcatcctcgacacactcaagaaacagtggaagggacctgacgatatactacttgggatgttctatgacacagatgacgcaagttttaagtggtttgataattccaacatgacctttgataaatggacggatcaggatgacgatgaggatttagtggacacctgcgcctttctgcatattaagactggcgaatggaaaaagggtaactgcgaagtatcatctgttgagggcactctgtgcaagacggctatcccttataagcgcaagtacctgagtgacaaccacattctgatcagtgccctggtgattgccagcacagttatcttgactgtcctgggcgccatcatttggttcctatataaaaagcattcagattctcgatttaccacagtgtttagcacagctccccagtccccctacaacgaggactgcgtgctggtcgttggggaggagaacgagtatcccgtacagttcgattag

SEQ ID NO: 268 - DNA, 5622 bp, Artificial Sequence
  Description of Artificial Sequence: Synthetic Transcript Sequence
atgagaactggctgggcgactcctaggcggcccgccggtttgctgatgctccttttttggttttttgacctcgcagaacccagcgggagagccgccaacgatccattcactatcgtccatggtaacactggtaaatgcattaagcctgtgtacggatggattgtggcggacgattgcgatgaaactgaagataagctttggaagtgggtaagtcaacatcggctctttcacttgcattcccagaagtgtttgggtctggatattaccaagagtgtgaatgagttgcgcatgttctcatgcgactcctcagccatgctctggtggaagtgcgagcatcactctctttatggggcagcgcgttacaggttggccttaaaggatggccatggaactgccatctccaacgcttccgacgtttggaagaaaggcgggagcgaggagtcgttgtgtgatcagccttatcacgaaatatatacacgcgatggtaatagttacggaaggccatgtgagtttccgtttctcatcgacggtacctggcatcatgattgcatcctagacgaggatcattcaggcccctggtgcgctaccacactgaactatgaatacgataggaagtggggtatctgtctgaaacccgaaaacggctgcgaggacaactgggaaaagaacgagcagttcggtagctgctatcagtttaacactcagaccgccctctcctggaaggaagcatacgtgagttgtcagaaccagggggccgatcttctgtctataaattctgcagcagagctgacctatttaaaggaaaaagaagggattgcgaaaattttttggattgggttgaatcagctttatagcgcccgggggtgggaatggtccgaccacaaaccattgaactttctcaactgggatcccgatcgcccgtccgctcccacgattggcgggagcagctgtgcccgcatggacgccgagtctggactgtggcaatcgttctcatgcgaagcccagttgccttacgtctgtcgcaaacctttgaacaacactgtggagctgactgatgtgtggacatattccgatacacgttgcgatgcaggatggctgcctaacaatgggttctgctatctactggtgaatgagtctaacagctgggacaaggcacacgccaagtgcaaggcattttcaagcgacctcatcagtattcatagccttgccgatgtcgaggtggtcgtcaccaaactgcacaacgaagatatcaaggaagaggtgtggatcggccttaaaaatattaatatccctacactctttcaatggtctgacggcaccgaggtaacattgacctattgggatgagaatgagcctaacgtaccttacaataaaactcccaactgcgtctcgtacttgggcgaactggggcagtggaaagtgcaatcctgcgaggagaagctcaagtatgtgtgtaagagaaaaggggaaaaattgaacgatgcatcgtccgataagatgtgcccaccagacgaaggctggaagagacacggagagacctgctataagatctatgaagatgaagtgccattcggaactaactgcaaccttaccatcaccagccgcttcgagcaagaataccttaacgatctgatgaagaagtacgacaagagtcttcgaaaatacttctggactggcctgcgcgatgtggattcatgcggggagtataattgggccactgtaggaggacggcgacgtgccgttacattctccaattggaatttcctcgaacccgcaagccctggtggatgcgtggccatgagcacaggtaagagcgtggggaagtgggaagttaaggattgccgctctttcaaggctctctccatatgtaaaaagatgtccggacctctgggccccgaggaagcttcccctaagcccgacgatccatgccctgagggctggcaatcatttcccgcatcactgagctgctataaggtgtttcatgccgaacgcatcgtgagaaagcgaaactgggaggaagcagagagattctgtcaggctttgggggcacatctgtcttcttttagtcacgtggatgagattaaggaatttctgcatttcttaaccgaccaattttcaggtcagcattggctatggattggattaaataagcgcagtcctgacctgcagggctcgtggcagtggtcagataggactccggtgagtacgatcatcatgcctaatgagttccagcaggactatgatatccgggactgcgccgcagttaaagtatttcacaggccttggagaagggggtggcacttctatgacgatagagagtttatctatctccggccctttgcatgtgataccaagctggaatgggtgtgccagattcctaagggccgaacacctaagaccccagattggtataatcctgacagagcgggcatacatggacccccattaatcatagaagggagtgaatattggtttgtggcagacttacatttgaattatgaagaggccgtcttgtattgtgcatccaaccacagctttcttgccaccattacatccttcgtaggactgaaagctatcaaaaacaaaatcgccaacataagcggcgatggccagaaatggtggatccggattagtgagtggcccattgatgatcactttacgtacagccgttacccatggcatcgctttcctgtgacctttggtgaggaatgcctttatatgtccgccaaaacatggctcattgatttaggcaaacctactgactgtagcacaaagcttccatttatctgcgagaagtataacgtcagcagtctcgagaagtattctccagatagcgctgcaaaggtgcaatgcagtgaacaatggattccatttcagaacaagtgttttctgaaaattaaacctgtgtcactcaccttttcccaggcctccgacacctgtcactcctatgggggaacgctcccatctgtgctttcccagatagaacaggattttatcacaagcctgctgcccgacatggaagccacactttggatcggactgcggtggactgcgtacgagaagatcaataagtggaccgacaatagggaactcacttacagtaattttcaccccctcctcgtctcagggcgcttgcgaatccctgagaatttcttcgaggaagagagcaggtatcattgcgccctcatcctaaacttacagaagagcccttttactggcacgtggaatttcacctcttgcagtgagcgccactttgttagcctgtgtcagaagtacagcgaagtgaaatcacggcagacactgcaaaatgctagtgagacagttaagtacctgaacaacctttataaaatcattcccaagactctgacctggcactctgctaagcgtgagtgcttgaaatccaatatgcagttagtgagcatcactgatccctaccagcaagcctttttgtcggtgcaagcactcctgcataactcctcactctggatcggtttatttagccaggacgatgaactgaattttggctggtccgacggtaagcgactgcattttagcaggtgggccgaaactaatggacaactggaagactgtgtggttttggacacagacggcttttggaagacggtggactgtaacgataatcaacccggagctatctgctactatagtggcaacgagactgaaaaggaggttaaacctgtggactcagtgaagtgcccatcacccgtccttaatacaccttggattccattccagaactgttgttacaatttcattattacaaagaataggcacatggcgacgacccaggacgaggttcatacaaagtgccagaaactcaaccccaaaagccacattctctctatccgggatgaaaaagagaacaatttcgtcttggagcagctgctctatttcaattacatggcatcctgggtgatgctgggcatcacctacaggaataagagcctgatgtggttcgacaaaactcctctctcttacacacactggagagcagggaggcctaccataaaaaacgagaaattcctggccgggctgtccacagatgggttctgggatatccaaaccttcaaggtgatcgaggaagctgtttattttcaccagcactcaatcctcgcctgcaagatagagatggtcgactataaagaggaatacaacacgactctcccacagttcatgccatacgaagacggaatctatagcgtgatccaaaagaaagtgacttggtacgaagcattaaatatgtgctctcagagcggcggacacctggcgtctgtgcataaccagaatgggcagctttttctggaggacattgtgaagagggacggcttccctctgtgggtaggcctgtcctctcacgatggttcggagtcctccttcgagtggtctgacggttccacctttgattacatcccatggaagggccagacatctcctgggaattgtgtacttcttgaccccaaaggtacgtggaaacacgaaaagtgtaatagtgttaaggatggcgccatatgctacaagcctacgaagagtaaaaagctcagccggttgacttactctagccgatgtcctgcggctaaagagaatggaagtcggtggatccagtataaaggacattgctataaatcagatcaggcccttcattcattctcagaggccaaaaaactctgctcaaagcacgaccatagcgctaccatagtgtctattaaggatgaggacgaaaacaagtttgtgagccggctcatgcgtgaaaacaacaacattactatgagagtgtggctcgggctgtcccagcatagcgttgatcaaagttggtcctggttggatgggtcggaagttaccttcgttaagtgggagaacaagtccaaaagtggtgtggggagatgtagcatgctgatcgccagcaacgaaacttggaagaaggtggaatgtgagcatggctttggccgcgtggtgtgtaaagtacctcttgactgcccctcgtctacgtggattcaattccaagatagttgctatattttcctgcaagaagctatcaaggtggaatcaatcgaggatgtgagaaatcaatgtactgaccatggcgcggatatgatatccatccacaacgaagaggagaatgcctttatactggacactctgaaaaaacagtggaagggccctgatgatatcctgctagggatgttttacgacaccgacgatgcttcgttcaagtggttcgacaattcaaatatgacatttgataagtggaccgaccaggacgatgacgaggaccttgtcgacacctgtgctttcctgcacattaagacaggggagtggaagaagggaaactgtgaggtgtccagcgtggagggcactctgtgtaagacagccattccatataagaggaagtatctaagcgacaaccacattttgatttcagcactggtaattgccagcaccgttattctcactgtactaggggccatcatttggttcttatacaaaaagcacagcgattctcgatttaccacagtgttttctactgctcctcaaagcccttataacgaggattgtgtgctggtggttggggaggagaacgaatatcccgtgcaatttgattag

SEQ ID NO: 269 - DNA, 186 bp, Artificial Sequence
  Description of Artificial Sequence: Synthetic Transcript Sequence
atgaaaagatttctcttcctactcttgactatttcacttctggtgatggtccagatccagacaggccttagcgggcagaacgatacaagccaaacctcctcgccatccgcttccagtaatatttcggggggaattttcctctttttcgtagccaatgccattatccacctcttttgcttttcatag

SEQ ID NO: 270 - DNA, 1062 bp, Artificial Sequence
  Description of Artificial Sequence: Synthetic Transcript Sequence
atggagctgaccgagcttctgctagtggtcatgctgctgttgacagcccgactgacgctgagctctccagctccacctgcctgtgacctccgggtactgtctaagctgctccgagattctcacgttttacactctagactgagccagtgcccagaggtacaccccctacctactcccgtcctcctgccagccgtcgacttcagtctaggcgaatggaagactcagatggaagagacaaaagcacaagatattctgggcgccgtgactttgctgctagagggcgtcatggctgctagaggccagttaggacctacatgcctttcaagcctccttggccagctgtcagggcaggtcagattgctcttgggcgcactgcaatcactactcggaacccagctgccgcctcaggggcggaccaccgcccataaagaccccaacgctatattcttgagcttccaacatctcttgcggggaaaggtcaggtttctgatgttggtaggagggtcaaccctctgtgttagacgggcaccacctaccacggccgtcccctccagaacctccctggtcctgaccctaaatgaactccctaataggactagtggattgctggagaccaatttcacggccagtgcgcggacaacggggagcggactgttgaagtggcaacagggatttcgggctaagattcctggactgctgaaccagacctccaggtccctcgaccaaatacctgggtatctgaatcggattcacgaactcctcaatggaacacgcgggctattccctggaccctctcgacgcacattgggagctcccgacatctcttcaggtacctccgacacagggtccctcccacccaaccttcagcctgggtattcaccctccccgactcaccctcccacagggcagtatacactttttcctttgcctcccaccttgccaacccctgtcgtccagctacaccccctcttgcctgatccatctgcgcccacaccaacacccacatctcccctccttaacactagttacacacattcacaaaatcttagccaagaaggatag

SEQ ID NO: 271 - DNA, 537 bp, Artificial Sequence
  Description of Artificial Sequence: Synthetic Transcript Sequence
atgacggtgctggcaccagcatggagcccgaccacctatttactcctgttgctcttgttgtctagcggcctctcggggacgcaggactgttccttccagcacagtccaatcagctctgattttgctgtgaaaattcgagaactttcagactatctcctccaagattacccggtaacagtggcttctaacctccaggacgaggaactttgcggcgggctgtggcggctcgttttggcccagcgctggatggagcggctgaagacagttgctggcagcaaaatgcagggacttctggaacgggtcaatacagagattcactttgttacaaaatgcgcatttcagccgccaccctcctgtctgcggttcgtgcagactaacatttcacgtctgctgcaggagacaagcgagcaactggtcgctctaaagccctggattacaagacagaacttttcacgctgtctcgagctgcaatgccaacccgtggagactgtgttccacagggtctcgcaagatggcttagacctgttaacatcatag

SEQ ID NO: 272 - DNA, 708 bp, Artificial Sequence
  Description of Artificial Sequence: Synthetic Transcript Sequence
atgacagtgctggcccccgcctggagcccgacaacctaccttcttctgcttttgctccttagtagtggactgagtggcacacaggattgctcattccaacacagccccatttcctccgacttcgcagtgaagatccgggagctgagtgactatttactgcaggattatcccgtgacagttgcctccaatcttcaggatgaggagctgtgcggcggattatggagactcgtgctggcacagcgctggatggaacggctaaagactgtggcaggaagcaaaatgcaggggctgctggagcgagtgaacacagagatacactttgtcaccaagtgtgcattccagccccctcccagctgcctccgcttcgtgcagaccaacatctcacggttgctgcaggagaccagtgagcaactggtggcccttaagccgtggatcacacggcagaattttagccggtgtctggagttgcagtgccaacccgacagctctacattaccccctccttggagcccgcgcccccttgaagccacggcacccaccgccccgcagcctccgctgctgctgctactgctgctgccagtgggtcttctactgctggccgctgcatggtgtcttcactggcaaaggacaagacgtcgcactccaagacctggagagcaggtgccgccagtgccatcaccccaggacctgctgctggtagagcattag

SEQ ID NO: 273 - DNA, 1110 bp, Artificial Sequence
  Description of Artificial Sequence: Synthetic Transcript Sequence
atggtatgggccccacttgggcctccacggaccgactgtctgaccctccttcatacacccagcaaggattcaccaaagatgtccctggaatggttagttgcatggagctggagcctggacggcttacgcgattgcatagctacaggcatccagtccgtaagagactgcgatacgacagccgttatcactgtcgcttgcctgttagtgctgtttgtctggtattgctatcacgtaggtcgagaacaaccccggccatacgtgtcagttaactcactgatgcaggcagcggacgccaatggacttcaaaatggttatgtctactgccagtcacccgaatgtgtccgttgtacccataatgagggcctgaatcagaaactctaccacaatttacaggagtacgcaaaacgctatagctggagcgggatgggcaggattcataaggggattagagagcagggtagatacctaaacagcagaccttctatacagaaacccgaggtgtttttcttgcctgaccttccaactaccccttacttcagtagggacgctcagaagcatgacgtagaggtgctggagcgaaattttcagaccattctctgcgaattcgaaaccctctacaaggctttcagcaattgcagcctcccacagggctggaaaatgaacagcacaccctctggagagtggtttaccttctacctggtcaatcagggagtttgcgtgccacgtaactgcagaaaatgccctcgcacatacaggctgttagggtccctgaggacatgcattgggaataacgtcttcggtaacgcttgcatttctgtgcttagcccggggaccgtaattacggaacactacggacccacgaacatcaggatccggtgccacctgggactaaagacacccaacgggtgcgagctcgtggtggggggagagccgcagtgctgggcagagggccggtgcctgctgttcgatgactcctttctgcacgccgctttccatgaggggtcagctgaagacggcccccgtgttgtattcatggtcgacctatggcacccaaatgtagcggctgcagaacggcaggccttagatttcattttcgctccaggccgctag

SEQ ID NO: 274 - DNA, 1989 bp, Artificial Sequence
  Description of Artificial Sequence: Synthetic Transcript Sequence
atgaggccacagattctgctgctactagcactattaacactaggcctggcggcccagcatcaggacaaggtgccatgcaaaatggtggacaagaaagtctcctgtcaggtactaggactgttgcaggtcccctcggtgctcccgccagatactgagaccctggacctttccggcaaccagcttcgaagcattctagcgagcccgctgggtttctacaccgccctcagacacctggacctctccaccaacgagatcagctttctgcagccaggcgctttccaggcattaacccatctggagcacctatccctggcccacaaccggctcgcaatggccaccgctctgtccgccggcgggcttggaccgctcccgagggtaacctctctcgacctgagtggaaacagcctttactcgggccttctggaacgcctgctgggggaggcccccagcctgcatacactatccctcgcagaaaattccctgacaaggttgactcgacacacatttagggatatgcctgccctcgaacaactggatctgcatagcaacgtgttgatggatatcgaggatggggcctttgagggcctgccaagactcacacacctgaatttgtctcgtaattccttaacttgcatttccgattttagtctgcaacagcttagggttctggacttaagctgcaattctatagaggccttccagactgctagtcagcctcaggccgaattccagctgacctggttagacctccgtgagaacaagctccttcactttcccgatctcgccgcactgccccgactcatttacctgaatctgagcaataatctgattagattaccaaccggtcctcctcaggatagtaaagggatccacgctcctagcgagggatggtccgcacttcctcttagtgctccaagcggaaacgcctctgggagacctctcagccagcttcttaatctggacttatcatataacgagatcgagctcatcccagatagcttcctcgagcacctgactagcttgtgctttctcaatctctctcgcaattgcttgcgcacatttgaggcccgaagactgggctccttaccgtgcctgatgctgctggacctatcacacaacgcacttgagacattggagctcggtgcaagggcactgggttccttacgtactttactactgcaagggaacgctctgagggaccttccaccctatacatttgcgaaccttgctagcctccaacgactgaatctacaaggaaatagagtctccccctgcggcgggccagacgagcccgggccatccggctgcgtggcattttcaggtatcacatctctacgaagcctcagcctggtggataatgaaatcgagttgcttagggccggagcattcttacatactcccctcacggagttggacctgtcttcaaaccccggactggaagttgccaccggggccctgggggggctggaggcgtccctggaggtgttggccttacagggaaacgggctgatggtactgcaggtagacctcccttgttttatctgcctgaaacggttgaatttagccgagaatcgcttgtctcatttaccggcatggacccaggccgtgtctctagaggtgctggacctgcgtaataattccttctctcttctgccaggctccgccatgggcgggctggaaacttccctccggaggttatacttacaggggaatcccctgtcatgttgcggtaacggctggttagcagctcagttacaccagggaagagtggacgttgatgccacgcaggatctgatatgcagattctcttcgcaggaggaagtcagtctgagtcacgtacgcccagaagattgcgagaaaggaggcctgaagaacatcaacttaattatcatactcacctttattcttgtctctgccatcctgctgactaccctggctgcctgttgctgcgttcgtaggcagaaattcaatcagcagtataaggcttag

SEQ ID NO: 275 - DNA, 1989 bp, Artificial Sequence
  Description of Artificial Sequence: Synthetic Transcript Sequence
atgaggccacagattctcctgctgctcgcacttttgacacttggcctcgccgctcagcatcaggataaggtaccctgcaagatggttgacaagaaggtgtcctgccaggtactagggttgctgcaagtgcccagcgtcctgccaccagacacggaaaccctggacctgagcggtaaccaactcagaagcatcttggcctctccactgggattctacaccgctctcagacatctggacttatctaccaacgagatttcattccttcagccaggggcttttcaagccttgacccacttggagcacctgtccctggcccataacaggttggctatggccactgcactgagcgccggagggttgggccctcttccacgcgtgacctcgctagacctgagtggtaattccctctatagcggcctgctggagcgcctgcttggcgaggctccttctctgcataccctgtcactggcagagaatagcctgactagattaactcgccatacattccgagacatgccagctctcgagcagttagatctgcacagcaacgtcctgatggatatcgaagacggcgcgttcgagggacttcccagactaactcatctgaaccttagccgcaatagtctgacatgcatctccgacttctctctccagcagctgcgggtgctggacctgtcatgtaatagcattgaggcatttcagaccgcctcacagcctcaggcagagtttcagctcacctggctggacctaagagagaataagctattgcatttcccagatctcgcagcacttccccggctgatttaccttaatttatctaataacctcatcagattgcctaccgggcccccacaggacagtaaagggatccatgccccgagcgaaggctggagcgctctgcctctgagcgccccatctggcaatgcaagcgggcgtccattgagccagctgctgaacctcgatcttagctataatgagattgaattgattcctgatagcttcctcgagcatttgacatccctatgttttcttaatctgtccagaaactgtctccgcacattcgaggcacgccggctaggctcccttccttgtctgatgctgctggacctcagccacaatgctcttgaaaccctagagctgggcgctcgggctctggggtccttgagaaccctgctccttcagggcaatgccctccgggatctccccccttacacctttgctaacctcgcttcactgcagaggctgaatctgcagggaaacagggtaagtccatgcggcgggcccgacgaacctggtccgtcaggttgcgtcgctttttccggaattacaagcctgcggtcacttagcttagtcgacaatgagatcgagttattgagagcaggagcattcctccatactccgcttaccgagttggatctcagttccaatcctggcctcgaggtggccaccggagcacttggaggcctggaggcatcgcttgaggtcctcgccctgcagggtaacggcctgatggtgctgcaggtcgatctcccatgctttatctgtttaaaaaggttgaatctcgctgagaaccggctgtctcatttaccagcctggacccaagccgtttctctggaagtgctggacctcaggaacaactccttttcactcctgccgggcagtgccatggggggcctagaaaccagcctgaggcggctgtatctgcagggcaaccccttgtcgtgctgcggtaacggatggctggcagcccagcttcaccagggcagggtcgacgttgatgcgacacaagatctcatctgtcgattctcctctcaggaggaggtgtcactgagccacgttaggccggaggactgtgaaaagggcggattaaagaacattaatttgattatcatcctcacatttattctggtgtctgccatactactgacaaccctagctgcctgctgctgcgtaagaaggcaaaaattcaatcagcagtacaaggcctag

SEQ ID NO: 276 - DNA, 1989 bp, Artificial Sequence
  Description of Artificial Sequence: Synthetic Transcript Sequence
atgaggccccagattctactgctgcttgctttgctgaccctcggcttagctgctcaacatcaggacaaagtgccttgcaaaatggttgataaaaaggtctcctgccaggtactgggcttacttcaggtgccatctgtgctgccccccgacactgaaacccttgacttatccggaaaccagctgagatcaatcctcgcatcaccactgggcttctatactgcgcttcgccaccttgatctctccacaaacgaaatttcattcctgcaaccaggagccttccaggctctgacacatcttgagcacctttctttagctcacaaccggctagccatggccaccgcgctatcagctggagggcttggcccactgccacgggtgacatcgttagacctgtcaggcaactccctatacagcggattattagaacgcctgctgggggaagccccatcattgcacacattatccttagctgagaactccttgaccagattgacccggcacacatttcgcgatatgcctgctctggagcagcttgatctgcatagcaacgttctcatggacatcgaggatggcgcgttcgaggggttgccgcggttaacccatctgaacctgtcaaggaattctctcacctgcatcagcgacttctctctgcaacaactccgagtactcgatctgagctgtaacagcatcgaagcgttccaaactgcatcccaaccccaagccgagttccaattgacatggctcgacctgagggaaaataagctcctgcacttccccgaccttgcagcacttccccggctgatttatctgaatctctctaacaacctcatcagactgcctacagggccaccccaggactctaagggcattcatgcaccctccgagggctggagcgccctgcccctgtcagcccccagcggtaatgcctcaggaagacccctcagccaactgctgaacctcgatctgagttacaatgagatcgaactgatcccagacagtttcctcgaacacctcactagcctctgttttctcaatctgagccgcaattgtctgcggaccttcgaggcccgccgcctggggtcattgccctgtctgatgctgttggacctgtctcacaatgccctggaaactctggaactcggtgcaagagcccttggctcactgcgcacattgttgctccagggcaatgctttgcgggacttgcccccttatacttttgcaaatcttgccagcttgcagagactgaacctgcagggtaatcgagtgagcccctgcggcgggccagatgagcccggaccctcaggatgtgtggccttcagcgggataaccagcctccgctctctcagtcttgtggataacgaaatcgaactgctgagggctggcgcatttctacacactcctctaaccgagttggatctgagttctaaccctggtttggaagtggccacaggtgcgctgggagggctcgaggcttcacttgaagtcctggccctccaagggaacggcctcatggtactgcaggtcgacctgccttgctttatatgcctaaaaaggctgaatctggcggagaatcggctgtctcatcttcccgcctggacacaggctgtgtcactagaggtgctagatctgagaaacaatagtttcagcctcctgccaggtagtgccatgggtggcctcgaaacatctctgcgccgcctgtatctgcaaggaaacccgttgtcatgctgcggcaacggatggctggctgctcagttgcaccagggccgtgtggatgtggatgccactcaggatctgatttgcaggttttcctctcaggaagaagtgagcctgtcgcacgtccggcctgaggattgtgaaaaaggcggactcaaaaatattaatctcattataatactgacattcattctcgtgtccgctatacttctcactaccctagcggcgtgttgttgcgtccgccgtcagaaatttaaccagcagtataaagcatag

SEQ ID NO: 277 - DNA, 561 bp, Artificial Sequence
  Description of Artificial Sequence: Synthetic Transcript Sequence
atgaggccacagatcctcctgctgctcgccctgcttacccttggactcgctgcgcagcaccaagataaagtgccatgcaagatggtggataagaaggtgtcgtgtcaggtgctgggcttgcttcaggtcccgagtgtgctgcctccagacacagagaccctggaccttagtggcaatcagctgcgttctattctcgcgagcccgttgggcttctataccgccctgcgtcaccttgatctctctaccaacgagatctcctttctgcagcctggagccttccaggctctgacccatctcgagcacttatccctcgcccacaataggttggcaatggcaaccgcactctctgccgggggcttgggacctctgccccgggtgaccagtttggatctttccggaaactccttatattcaggcctgttggagagactcctgggtgaggccccctctttacataccctctccttggctgaaaattccctgacccgccttaccagacacacctttcgggatatgccagccctggagcagctcgatctccacagtaacgtgctcatgtag

SEQ ID NO: 278 - DNA, 1212 bp, Artificial Sequence
  Description of Artificial Sequence: Synthetic Transcript Sequence
atggctcatgctatggagaattcatggacaatcagcaaggagtaccacatcgacgaggaggttggattcgccctgcctaacccacaggagaaccttccagacttttacaacgactggatgttcattgccaagcacctgcccgacctgatcgagtcaggccaactccgggaacgggtcgagaaacttaatatgctaagtattgatcacttgaccgatcataagtcgcaaagactggcgaggctggtattaggatgtattaccatggcctatgtctgggggaaaggtcacggtgacgtgcggaaggtcctcccgcgaaatatcgctgtcccttattgtcagctctcaaaaaaacttgagttgcctccaattctggtttatgccgattgcgtattggctaactggaaaaagaaagacccgaataagcccctgacatacgagaacatggatgtactattctcatttagagacggagactgctcaaagggtttttttctcgtttcactgctggtggagattgcagcggcctcggctatcaaagtcataccaacagtgtttaaggccatgcagatgcaagaacgagatactttacttaaagctctgttggaaattgcctcttgcctcgaaaaagccctgcaggtgttccaccagatccacgatcacgtcaatcccaaggccttcttttccgtgcttcgtatctatctgtcaggttggaaaggaaatccccagctgagcgatggactggtctatgagggtttctgggaggatccgaaggagtttgctggtggctcagctggacagagttccgtgttccaatgtttcgatgtgttactcggaatacagcagaccgccggaggcggccacgcagctcaatttctccaggacatgcggcgctatatgccacctgcccaccggaacttcctgtgttctttggaatctaacccgtccgtgagggaattcgtactttccaaaggggatgccggattgcgagaggcctatgacgcatgcgttaaagccctggtgtccctcagatcttaccatcttcagatcgttacgaagtacattcttataccggcgtcacaacagcctaaggagaataagactagcgaggacccaagcaaattggaagccaagggcacaggcggaaccgatctcatgaatttcctgaagacggttcggtctaccaccgaaaagtccctgctaaaggagggatag

SEQ ID NO: 279 - DNA, 237 bp, Artificial Sequence
  Description of Artificial Sequence: Synthetic Transcript Sequence
atggctcatgctatggaaaacagctggaccataagcaaggagtaccacatcgacgaagaggtgggattcgctctgcccaatccccaggagaacctacccgacttctataacgactggatgtttattgcaaagcacctgcctgacctcatcgagtccggacaattgcgggaaagagtggagaagctcaacatgctgagtatcgaccacctcactgatcataagagtcagaggctttag

SEQ ID NO: 280 - DNA, 543 bp, Artificial Sequence
  Description of Artificial Sequence: Synthetic Transcript Sequence
atggcccatgccatggaaaattcctggaccataagcaaagagtaccacatcgacgaagaagtaggtttcgcgttgccaaacccgcaggagaacctacccgacttttataacgattggatgtttatcgcgaaacaccttcctgatttaatcgagtccgggcaactgagggagcgcgtggagaagctgaacatgctgagtattgaccacctcaccgaccacaaatcacagcggctcgcccgcctagtgcttggttgcatcactatggcctatgtttgggggaaggggcacggcgacgtgagaaaagtcctcccccggaatatcgctgtgccttactgtcagctaagcaaaaagctcgagttacctccgatactggtttacgccgattgtgtgctggccaactggaagaaaaaagatcctaataagcctttgacatacgagaatatggacgtactgttttctttccgagacggagactgttcaaaaggcttttttttggtttctctactggttgaaattgccgccgcaagtgccatcaaagtatag

SEQ ID NO: 281 - DNA, 1212 bp, Artificial Sequence
  Description of Artificial Sequence: Synthetic Transcript Sequence
atggctcacgctatggaaaattcctggaccatcagcaaggagtaccacatagacgaggaagtgggattcgccctgcccaacccacaggagaacctgcccgatttctacaatgactggatgttcatcgcaaagcacctcccggacctcatagagtccggccaactgcgcgaaagagtcgagaagctaaacatgctgtccattgatcacctgacagatcataagtcacagagactggccaggctcgtgctgggctgcatcacgatggcctatgtctggggtaagggacacggcgacgtcagaaaagttctcccgcggaatatcgccgtcccctattgtcaactgtccaaaaagttggaattgcccccaatacttgtctatgctgactgtgttctggccaattggaagaaaaaagatcccaacaaaccgctaacctatgaaaacatggacgttctcttctcttttagggacggcgactgttctaaaggattctttctggtgtccctgctggtggaaatagctgctgctagcgcgataaaagtgatccctacggtctttaaggccatgcagatgcaggaacgggatacgctgcttaaggccctcttagaaatcgcgtcatgcctcgagaaagcactgcaggtattccatcagattcacgaccatgttaatcctaaggcctttttttctgtcctaagaatctaccttagcggctggaaaggcaacccccagttgagtgacggcctggtttacgaggggttctgggaggaccccaaggagtttgcaggagggagcgccggtcagtcaagcgtgttccaatgtttcgatgtacttctggggattcagcagacggccggggggggccacgctgctcagttccttcaagatatgcgtaggtatatgcctccagcccacagaaactttctttgttcactggagagtaaccccagcgtgagagagtttgttctgagcaaaggagacgcaggtctgcgtgaagcttacgatgcatgcgtgaaagccctggtatccctgcggtcctaccatttacagatagttaccaagtatatcctcatacctgcgtcccagcaacccaaagagaacaagacttcagaggacccttctaaactggaggctaaaggcacaggtggcactgatctcatgaacttcctcaagacggtgcgttcaacgaccgagaagagcctcctcaaagaaggctag

SEQ ID NO: 282 - DNA, 144 bp, Artificial Sequence
  Description of Artificial Sequence: Synthetic Transcript Sequence
atggctcatgctatggagaactcttggacaatcagcaaggagtaccacatcgatgaagaggttggcttcgctctaccaaacccacaagagaatctcccagacttctacaacgactggatgttcatcgctaaacacctgccgtag

SEQ ID NO: 283 - DNA, 1224 bp, Artificial Sequence
  Description of Artificial Sequence: Synthetic Transcript Sequence
atggagcctcatcggcccaatgtgaaaaccgccgttccgctgtctctggagtcataccacatctcagaagaatatggcttcctgttgcctgattccctcaaggagcttcccgaccactacaggccatggatggagatcgcaaacaaattgccccagctgatagatgcccaccagctccaggcccacgtcgataagatgcccctattgagctgtcaattcttgaagggacacagagagcagagactggcccacctggtcctgagtttcctcacaatgggttatgtttggcaggagggggaagcccagccggcggaggtgctgccaaggaacctagcattaccctttgtcgaggtctcgaggaacttgggtctgcctcctatcctggtgcattccgatctggtgcttactaattggactaaaaaggatcccgatggttttctggagatcggaaatttggagactattatcagttttcctgggggcgaatctctccacggatttatcctggtgactgccctagtggaaaaggaggccgtgcctggcattaaggcgctcgtccaagccactaacgctatcctgcagcccaaccaggaagccctgctgcaggccctgcagagactacgcctcagtatccaggatatcactaaaactcttggccagatgcacgattacgtggacccggacatcttctatgctggtatacgcatattcctctccggatggaaggacaatccggcaatgccagccggcctcatgtacgagggggtgagccaggagcccctcaagtattcaggcggaagcgctgctcagtcaacggtgctgcatgcatttgacgaattccttggcattaggcacagcaaggagtccggggattttctttaccggatgcgggactacatgccgccatcccacaaagccttcattgaggatattcattctgccccatccctgcgcgattatattctgagttctggccaggaccatctactgactgcttataaccagtgcgtgcaagccctcgcagaacttaggtcataccacatcactatggtgaccaagtatctgattactgcagctgccaaggctaagcatgggaagccaaatcacctgccaggtccacctcaggcactcaaggatcgcggcaccggtggtactgccgtcatgagctttctaaaaagtgtccgggataagactctcgaaagcatcttacacccccggggctag

SEQ ID NO: 284 - DNA, 1263 bp, Artificial Sequence
  Description of Artificial Sequence: Synthetic Transcript Sequence
atgttgcacttccactattatgatacatctaataaaattatggaaccacacagaccgaacgtcaagacggcagttcctcttagtctggagagctaccatataagcgaggagtatggattcctgttgcctgatagtctgaaggagctcccagatcactataggccctggatggaaatagcaaacaagttgccgcagctgatagacgcgcatcagctgcaagcccacgtggataaaatgccacttctgtcttgtcagtttttgaaaggccacagagagcagcgtctcgcacatctcgtgctgtcttttctgacaatggggtacgtgtggcaggaaggtgaagcacagcccgcggaggttcttcctaggaacctcgctctccccttcgtggaagtgtcacggaacttgggactgcctcccattctcgttcacagcgacttggtgctcacaaattggaccaagaaggatcccgatgggttcctggaaatcggaaatctggagaccatcatttcctttccgggcggagagtctttgcacggtttcattctggtgacagcactcgtggagaaagaggcagttccagggatcaaggctctagtgcaggcaacgaacgcaattctgcagcctaatcaggaggcactgcttcaagccctgcaaaggttgaggttgagtatccaggatatcacaaaaacacttggacagatgcatgactacgttgaccctgatatcttctacgcgggtatccggatatttctctccggctggaaggacaacccggcaatgccagcaggccttatgtacgagggcgtcagccaggagccccttaaatatagtggggggagtgctgcacagtccaccgtgctacatgccttcgatgaatttctcggcatccggcattccaaagaaagtggtgacttcctgtatcgtatgagggattatatgccacccagccataaagcgtttattgaggacatccactccgcaccttcccttcgcgactacatcctctctagcggacaggatcatctcctgaccgcatataaccagtgtgtgcaggcattagcagagctgcgctcttatcacattaccatggtgactaagtaccttatcactgcagctgccaaggcgaaacacggcaaacctaaccacctgccaggtccaccccaggccctcaaggatagaggtacgggcggaacagcggttatgtcctttctgaaatctgtgagggataagacacttgaaagcattctgcaccctaggggctag

SEQ ID NO: 285 - DNA, 537 bp, Artificial Sequence
  Description of Artificial Sequence: Synthetic Transcript Sequence
atgcactcctcagcattactctgttgtcttgtactgttaaccggcgttagggcttcacccggccaggggacacaatccgagaactcctgcacgcatttccctgggaacctccccaatatgcttagggatcttagagacgcattctcccgcgtaaaaactttttttcaaatgaaagaccagctggacaacctgcttctaaaggagagcctcctggaggactttaagggttacctcgggtgtcaggcgctgtcagagatgatccaattctacttagaggaagtgatgcctcaggccgaaaaccaagatcctgacattaaggcacatgtgaacagcctgggggagaacctgaaaactctgcgcctcaggcttagacgctgccacaggtttctgccctgcgagaacaaaagtaaggcggtcgaacaagtgaaaaacgcattcaacaagctacaggagaagggcatttataaggccatgagcgagtttgacatcttcattaattacattgaggcctacatgacaatgaagattcgcaactag

SEQ ID NO: 286 - DNA, 762 bp, Artificial Sequence
  Description of Artificial Sequence: Synthetic Transcript Sequence
atgtggcccccaggcagcgccagccagccccccccctcccctgccgccgcgactggtcttcaccctgctgcccgtccagtcagtctgcagtgtaggctttcaatgtgccccgctcgcagcctcctgttggtggctaccctggtgctgctagaccatctgtccctggcccggaacctgcccgttgctacaccagaccccgggatgttcccctgcctgcaccattcccaaaacctgctgcgcgcggtcagcaacatgctccagaaggctcggcagactctcgaattctacccgtgtaccagtgaggagattgaccacgaggacataactaaagacaagacttccaccgttgaggcctgcctccccttagaactgactaaaaacgagtcatgtctcaattccagagaaacttcatttataacgaacggctcatgtctggccagcagaaagacaagctttatgatggccttgtgtctttcctctatttatgaggatctgaagatgtaccaagtggagttcaagacaatgaacgccaagttgcttatggatcctaagagacaaatcttcctcgatcagaacatgctggctgttatcgacgagctgatgcaggcactaaattttaattccgagacggtgccccagaaatcgtccctggaggagccagatttttacaagaccaagattaaactctgtatactgctacacgcatttcgaattagagccgtgactattgatagagttatgagctacctgaacgcttcctag

SEQ ID NO: 287 - DNA, 720 bp, Artificial Sequence
  Description of Artificial Sequence: Synthetic Transcript Sequence
atgtggcctccaggatcagcaagtcaaccgccccctagccctgccgccgcgaccggcttgcaccccgcggcaagacctgttagtctccagtgcaggctgagtatgtgtccggcccggtccttgcttctagttgctacactggtgttgttggatcacctcagcttagcacgcaatctaccagtggctacaccagaccccggtatgttcccgtgcctgcatcattcacaaaacctcctgagggccgtgagcaacatgctgcaaaaggcacgccagacactggaattctacccctgcacttcagaggaaatcgaccacgaggatattaccaaggacaagacgtccaccgtcgaggcctgcctgccccttgaactaactaagaatggcagctgcctggccagtcgcaagacatctttcatgatggccttatgtctctcctccatatatgaggatcttaagatgtaccaggtggaattcaaaacaatgaacgctaaattattgatggaccctaaacggcagatctttttagatcagaatatgcttgccgtgatcgacgagctgatgcaggcattaaactttaacagcgagacagtgccccagaagagttccctggaggaacctgacttctataagacaaaaatcaagttgtgtatactgctgcacgcctttcgtatacgagctgttaccatcgaccgggtgatgagctacttaaacgcatcctag

SEQ ID NO: 288 - DNA, 648 bp, Artificial Sequence
  Description of Artificial Sequence: Synthetic Transcript Sequence
atgtggcctccagggtcagcctcgcaaccgcctccctctcccgccgccgccacaggccttcaccccgccgccaggcccgtgagtttacagtgcagactgtcaatgtgccccgctcggtcactgctcctggtggctaccctggtactcttggaccatttgagtcttgctcgcaacctcccggtggctactcccgaccctggcatgttcccatgcttacatcactcccagaacttactgcgggctgtatcaaacatgctgcagaaaaacgagtcttgtctgaacagtcgcgaaacttctttcataaccaacggcagctgtcttgcatcacgcaagacgtccttcatgatggccctgtgcctgagttccatatacgaagatcttaagatgtatcaagtggagtttaaaactatgaatgccaaactgcttatggacccaaagcgccaaattttcctcgatcagaatatgttagcagtaatagacgaacttatgcaggcgctgaacttcaattctgagactgtgccacagaagtcctccctggaggaaccagacttttacaagacgaagattaagctctgtatacttctgcatgcattcagaattagagccgtgacaatagatagggttatgtcctacctaaacgcatcctag

SEQ ID NO: 289 - DNA, 429 bp, Artificial Sequence
  Description of Artificial Sequence: Synthetic Transcript Sequence
atgagccttttacccgtcccctacacagaagccgcttcattgtctacaggctccacagtcactatcaagggccggcccctggcctgtttcttaaacgaaccatacctgcaggtcgacttccacaccgaaatgaaggaggaaagcgacatcgtttttcactttcaggtttgtttcgggaggagagtagtgatgaatagccgggagtacggcgcttggaaacagcaagtggaatccaaaaacatgccctttcaggacggacaggagtttgagctgagcatttccgtcctgcctgataagtatcaggttatggtgaatggccagtccagctacacattcgaccatcggatcaaaccagaagccgtgaagatggtccaggtctggagagatatcagtctgaccaaattcaatgttagctatctgaaacggtag

SEQ ID NO: 290 - DNA, 657 bp, Artificial Sequence
  Description of Artificial Sequence: Synthetic Transcript Sequence
atgtcttttgtgggggagaactccggtgtgaagatggggagcgaagactgggaaaaagacgagccgcagtgctgcttagaagacccagccggcagtccactggagcccggccccagcctgcctacaatgaatttcgtgcacactagcccaaaggtcaagaacttaaaccctaaaaaattttcgatccatgaccaggatcataaggtgctcgttctggactcgggtaatctgatcgcagtgcccgacaagaattatattcgtcccgaaattttctttgccctggccagcagcctgtctagcgcctccgcagaaaaggggagtcccattctgcttggggtgagcaaaggggaattttgcctgtattgcgacaaggacaagggacaaagtcacccttcactccagttaaagaaggaaaaactcatgaaattggctgcccaaaaggagtccgcgaggaggcctttcattttttaccgagcacaggtcggctcatggaatatgctggaaagtgccgctcatccgggctggttcatctgcacttcgtgtaattgcaacgaacccgtgggcgtaactgacaagttcgagaacagaaaacatattgaattttccttccagccagtatgcaaagccgaaatgagtccaagcgaagtgtctgattag

SEQ ID NO: 291 - DNA, 579 bp, Artificial Sequence
  Description of Artificial Sequence: Synthetic Transcript Sequence
atgtccggttgtgacagaagggaaactgaaaccaaaggaaaaaatagctttaagaaacggttacgcggacctaaggtgaagaatctcaatccaaagaaattcagcattcacgatcaggaccataaggtcctcgttctggactccggtaatctgattgctgtccctgacaagaactacatccggcctgagatcttcttcgccctggcttcatctcttagttcagccagcgccgaaaaaggctctcccattttgctaggagtgtctaagggagaattctgtctgtactgtgataaagacaaaggccaatcacacccttcgctccagttaaagaaagaaaaattaatgaagctggccgcacaaaaggagtccgcacgccgcccgtttatcttttatagggcacaggtcgggtcctggaatatgctagaatcagcagctcaccccggttggttcatctgtacatcttgtaattgtaatgagcccgtcggcgtaaccgataagtttgaaaaccgcaagcatattgaattctcattccagccagtatgcaaggcggaaatgtcgcccagtgaggtgtccgattag

SEQ ID NO: 292 - DNA, 474 bp, Artificial Sequence
  Description of Artificial Sequence: Synthetic Transcript Sequence
atgtctttcgtcggtgaaaattccggggtgaagatgggttcggaagactgggaaaaggatgaaccacagtgctgcctggaagaaattttctttgctctggcatcttctttatccagtgcatccgctgagaaagggagcccgatcctcctcggcgtttctaaaggagagttttgtctgtactgcgataaagacaaaggacagagtcatccctcattacaactgaaaaaagaaaagctgatgaagttagccgcccagaaggaatccgcgaggcgtcccttcatattctatagagcccaggttggctcttggaatatgcttgagagcgcagcacatccagggtggttcatctgtacatcttgcaactgtaacgagcccgtgggcgtcacagataaatttgaaaaccggaagcacattgaattctcctttcagcccgtgtgtaaggccgagatgtcgccttctgaagtctccgattag

SEQ ID NO: 293 - DNA, 594 bp, Artificial Sequence
  Description of Artificial Sequence: Synthetic Transcript Sequence
atgagctttgtcggtgaaaacagcggagtcaagatgggctccgaagactgggaaaaagacgaacctcagtgctgcctcgaaggtccaaaggtcaaaaatttaaatcccaaaaaatttagcattcacgaccaggatcataaagtgcttgtcctcgactcgggaaacctgatcgcagtccccgataaaaattacattcggcctgaaatcttttttgccttagctagctcactcagttcagcctccgccgagaaggggtccccaattctacttggagtgtcgaagggtgagttctgcttatattgcgacaaggacaaggggcagagccatccctcactgcagttaaaaaaggagaaactgatgaaactagcagcccaaaaggagagcgcgcgcaggcccttcatcttctaccgagcgcaggtcggatcttggaacatgctggaatctgccgctcatcccggatggttcatttgcacatcctgcaactgcaatgagccggtcggtgtaacagacaaattcgaaaaccgtaaacatatcgagttctcctttcaacccgtgtgcaaagccgagatgagcccctctgaggtgtccgactag

SEQ ID NO: 294 - DNA, 537 bp, Artificial Sequence
  Description of Artificial Sequence: Synthetic Transcript Sequence
atgtctttcgtgggcgagaattcgggcgtgaagatgggttccgaagactgggagaaagatgaacctcagtgctgtttggaggaccccgcagggagcccccttgaacccggtcccagcctacccaccatgaacttcgtacacactaagatattcttcgccctggcttcctccctttcatcagccagcgcagagaagggctcacccattctcctgggcgtgtcgaaaggcgagttttgcctgtactgcgataaggacaaaggccagagtcatccgagcctccaactcaagaaagaaaagctgatgaagctggctgcccagaaggagtcagcccgaaggccatttatattctaccgagctcaggtcggatcgtggaatatgctcgaaagcgccgcccatccagggtggttcatttgcacctcctgtaattgcaacgagcctgttggggtgaccgacaagttcgagaaccggaagcacatcgagtttagtttccagcctgtttgcaaggcagagatgagccctagtgaggtttccgattag

SEQ ID NO: 295 - DNA, 1344 bp, Artificial Sequence
  Description of Artificial Sequence: Synthetic Transcript Sequence
atgatccccaccttcacggctctcctgtgcctaggcctttctctgggacctaggacacacatgcaggcaggccctctgccgaagccaaccctgtgggccgaacccggctccgtgatcagctggggaaactccgtcactatctggtgccagggtacactggaagcaagagagtaccgcctggacaaggaagagtcacccgctccttgggaccgacagaaccccctggaaccaaaaaacaaagcccggttcagtatcccgagcatgacagaagattacgccggaaggtatcggtgttattacagatccccagtaggctggtcgcaaccatccgaccccctggagttagtgatgaccggcgcctattcaaagccaactttgtccgctttaccttctcctctggtaacgtcgggaaaaagcgttaccctcctgtgtcagtcacgaagtccaatggacaccttcctgttgatcaaggaacgtgcagctcatcctctgttgcacttgcgcagcgaacacggggcgcagcagcaccaggcagagtttccgatgtccccagtgacctccgttcatggggggacatacaggtgctttagttctcatggcttctctcactacttgttatctcatccgagtgacccactggaactgatcgtatcagggtcactggaggatcctcggccatctcccacacgtagcgtaagcactgccgcaggtccagaggaccaacctctaatgccgacgggtagcgtgcctcattccggactgaggcggcactgggaagtgctgatcggggttctggtggtatccattttgctcctgtccctccttctgtttctgctgcttcaacattggaggcagggaaagcaccggaccctggcccagaggcaagcggatttccagaggcctccaggggctgcagagcctgagccgaaagatggcggcttgcagcgtagaagctcgcccgccgccgacgttcagggcgagaatttttgtgccgctgtaaagaacactcagcccgaagatggagtggagatggacacgcggtcgccccacgatgaagatcctcaggccgttacttacgcgaaggtgaaacacagtaggccaaggcgcgagatggcctcaccgccaagccccttgtccggggagtttctggacacaaaagataggcaggcagaggaagatcgtcagatggacactgaagctgctgcttccgaagctccacaggacgtgacttatgcacaattgcattcatttactctgaggcagaaagctactgaaccgccaccaagtcaggaaggagcttcacctgcagaacccagtgtgtacgctacccttgccatccactag

SEQ ID NO: 296 - DNA, 636 bp, Artificial Sequence
  Description of Artificial Sequence: Synthetic Transcript Sequence
atggtcgcgcataaccaagtggccgctgacaacgcagtgtcaaccgcggccgagcccagacgtcggcccgaaccctcctcaagtagttccagtagcccagcggctcccgcccgcccccgtccctgcccggccgtgccggccccagcgcccggggatactcactttagaacattcaggagtcatgctgactacagacgcatcactagggccagcgctctgctggatgcatgtggattttactggggtccattgagtgtgcatggcgcccatgaacgccttagggccgagcccgttgggacctttctggtaagagacagtcgacaaaggaattgctttttcgccctcagcgtgaaaatggcctcaggtcctacttccattcgcgtacactttcaggctggcaggttccaccttgatggatcgagagagtcattcgattgtcttttcgagctgcttgagcactatgtggcagctccacggaggatgctgggcgctcctcttagacagcggagagtgcgacctttacaggagctgtgcaggcaaagaatcgtcgccacagtgggcagagagaatctggccagaatcccattgaatcccgtgctgagggattatctgagcagtttcccattccagatttag

SEQ ID NO: 297 - DNA, 1596 bp, Artificial Sequence
  Description of Artificial Sequence: Synthetic Transcript Sequence
atggccgccaccctggacttaaagtccaaggaggaaaaagacgccgagctagataagcgcatcgaggctctgcgaagaaagaatgaggcgttgattagacggtaccaggagattgaagaggaccggaaaaaggccgagcttgaaggcgtggccgtgacggcccctaggaaggggagaagtgttgagaaggaaaacgtggccgtcgaaagcgaaaagaatctgggacccagccggcggtctcccggcacaccccgcccaccgggcgcgtccaagggaggtcgaactcccccacagcagggtggacgtgcaggtatgggccgagcgagtagaagctgggagggctcccccggcgagcaaccgcgaggtggcggcgcgggagggcggggtcgaagaggaagaggtcgcggaagtccccacttgtctggcgccggcgacacatccattagtgacagaaagtccaaggagtgggaggaacgcaggcgtcagaacatagaaaagatgaacgaggaaatggaaaagattgctgaatacgaacgcaatcaacgggaaggcgtcctggaaccaaatcctgtgcgcaacttccttgatgatcctagacgccgttcaggcccgttggaagaaagtgagcgggatagaagggaggagtccaggcgccacggtcgtaactggggcggccccgacttcgagagggtgagatgcgggctcgaacacgaaaggcaaggaagaagggccggcttaggatcagccggtgacatgacactgtctatgaccggcagagagaggagtgagtatttgaggtggaaacaggagcgagaaaagattgaccaggagaggctgcagcgccatagaaaaccaaccggacagtggcgccgagaatgggatgccgaaaagacagacggcatgttcaaggacgggcccgtgcctgcccatgagccctcccacagatatgacgatcaggcttgggctagaccccccaagccaccaacgtttggtgagtttctgagccagcacaaggcggaggcgtcgagccgtcgaagaaggaagagctcccgccctcaggctaaagccgctcctagggcttactcagatcacgacgatcgctgggaaacaaaagaaggagcagccagtccagcgccagagacgccgcagccgacctccccggaaacatccccaaaggagacgccgatgcaacctcccgaaattcccgctcccgctcacagaccaccggaagacgagggtgaggaaaatgagggtgaagaggatgaggagtgggaagatatatccgaggacgaggaggaagaagagattgaagtggaggagggagatgaggaggagcctgctcaggatcatcaggccccagaggccgcccctaccggaatcccatgtagcgaacaagctcatggcgtgcccttctcaccggaggagccgctgctcgaaccacaggcgccgggaaccccaagcagtccgttctctcctccctctgggcaccagccagtcagcgactggggagaggaagtggagctgaacagccctagaactacacacctggctggggcgctctcccccggggaggcatggccgtttgaaagcgtctag

SEQ ID NO: 298 - DNA, 531 bp, Artificial Sequence
  Description of Artificial Sequence: Synthetic Transcript Sequence
atgaggatctttgctgtgttcatcttcatgacctactggcacctgctgaatgccccctacaacaagatcaaccagaggatcctggtggtggaccctgtgaccagcgagcacgagctgacctgccaggccgagggctaccccaaggccgaggtgatctggaccagcagtgaccaccaggtgctgagcggcaagaccaccaccaccaacagcaagcgggaggagaagctgttcaacgtgaccagcaccctgcgcatcaacaccaccaccaatgagatcttctactgcaccttccggcggctggaccctgaggagaaccacacagctgagctggtgattcctgagctgcccctggcccaccccccaaatgaaagaacccacctggtgatcctgggcgccatcctgctgtgcctgggcgtggccctgaccttcatcttccggctgaggaaaggaaggatgatggatgtgaagaagtgtggcatccaggacaccaacagcaagaagcagagcgacacccacctggaggagacctag

SEQ ID NO: 299 - DNA, 873 bp, Artificial Sequence
  Description of Artificial Sequence: Synthetic Transcript Sequence
atgaggatctttgctgtgttcatcttcatgacctactggcacctgctgaatgccttcaccgtgacagtgcccaaggacctgtatgtggtggagtatggcagcaacatgaccatcgagtgcaagtttcctgtggagaagcagctggacctggccgccctgattgtgtactgggagatggaggacaagaacatcatccagtttgtgcatggagaggaggacctgaaggtgcagcacagcagctaccggcagagggcccggctgctgaaggaccagctgagcctgggcaatgctgccctgcagatcacagatgtgaagctgcaggatgctggggtgtaccgctgcatgatctcctatggaggagctgactacaagaggatcaccgtgaaggtgaatgccccctacaacaagatcaaccagaggatcctggtggtggaccctgtgaccagcgagcacgagctgacctgccaggccgagggctaccccaaggccgaggtgatctggaccagcagtgaccaccaggtgctgagcggcaagaccaccaccaccaacagcaagcgggaggagaagctgttcaacgtgaccagcaccctgcgcatcaacaccaccaccaatgagatcttctactgcaccttccggcggctggaccctgaggagaaccacacagctgagctggtgattcctgagctgcccctggcccaccccccaaatgaaagaacccacctggtgatcctgggcgccatcctgctgtgcctgggcgtggccctgaccttcatcttccggctgaggaaaggaaggatgatggatgtgaagaagtgtggcatccaggacaccaacagcaagaagcagagcgacacccacctggaggagacctag

SEQ ID NO: 300 - DNA, 612 bp, Artificial Sequence
  Description of Artificial Sequence: Synthetic Transcript Sequence
atggtgcggctgcccctgcagtgtgtgctgtggggctgcctgctgacagctgtgcaccctgagcccccaacagcctgccgggagaagcagtacctgatcaacagccagtgctgcagcctgtgccagcccggccagaagctggtgtctgactgcacagagttcacagaaacagagtgcctgccctgtggggagagcgagttcctggacacctggaaccgggagacccactgccaccagcacaagtactgtgaccccaacctgggcctgcgggtgcagcagaagggcaccagcgagacagacaccatctgcacctgtgaggagggctggcactgcaccagcgaggcctgtgagagctgtgtgctgcacaggagctgcagccctggctttggagtgaagcagatcgccaccggggtgtctgacaccatctgtgagccctgccctgtgggcttcttcagcaatgtgagcagcgcctttgagaagtgccacccctggaccaggagccctggcagcgctgagagccctggaggagacccccaccacctgcgggaccctgtgtgccaccccctgggcgccggcctgtaccagaagggcggccaggaggccaaccagtag

SEQ ID NO: 301 - DNA, 786 bp, Artificial Sequence
  Description of Artificial Sequence: Synthetic Transcript Sequence
ggccgcagccccctgcggacccgggacagagtgctgaccaactgggaggatggcctgactgtggcctatggagctgtgaagctgatccagagcctgagcctgcagcctgtgggctggcagcagaactggggcctgagcagcccccccaccatgctgctgcccagccgggcccagagccccacagagctgcccctggcccccctggccgagcccaacacaggctgcagcagcctgctgtcctggcacagcaccagaggagagctgcacctgtgggccctgggcctgggccagatgggcggcagcaaatgtggcagccccctgagccccctggcccccaccctggaggccctgcggcggccctggtgtggccagcagggcgccggcggcacccggggcatcagcacagatcctccttctggaaaaggaggccgggcctggggccgggaccccctgccccgggagggcctgctgcggggcacagctgccccagctgctggaggagacctgaccccctgcctgagccggccccccacccccagcaggaacccccggcgcagcatcttccccaccatcttcctggcccccaccctgctgctgcagtgccggcggctgtacatggatgccaacagaagccccaggaggatggccaagagggtggccagccagtgccggcgggacagcgaggccgcccccacccaggagtgtggccacgtgggcaagcaggccgtgggccagagggcctggtgctgctgctgctgcggcgtgcgggtgcggggctggcactag

SEQ ID NO: 302 - DNA, 834 bp, Artificial Sequence
  Description of Artificial Sequence: Synthetic Transcript Sequence
atggtgcggctgcccctgcagtgtgtgctgtggggctgcctgctgacagctgtgcaccctgagcccccaacagcctgccgggagaagcagtacctgatcaacagccagtgctgcagcctgtgccagcccggccagaagctggtgtctgactgcacagagttcacagaaacagagtgcctgccctgtggggagagcgagttcctggacacctggaaccgggagacccactgccaccagcacaagtactgtgaccccaacctgggcctgcgggtgcagcagaagggcaccagcgagacagacaccatctgcacctgtgaggagggctggcactgcaccagcgaggcctgtgagagctgtgtgctgcacaggagctgcagccctggctttggagtgaagcagatcgccaccggggtgtctgacaccatctgtgagccctgccctgtgggcttcttcagcaatgtgagcagcgcctttgagaagtgccacccctggaccagctgtgagaccaaggacctggtggtgcagcaggccggcaccaacaagacagatgtggtgtgtggcccccaggaccggctgcgggccctggtggtgatccccatcatcttcggcatcctgtttgccatcctgctggtgctggtgttcatcaagaaggtggccaagaagcccaccaacaaggccccccaccccaagcaggagccccaggagatcaacttcccagatgacctgcccggcagcaacacagctgcccctgtgcaggagaccctgcacggctgccagcctgtgacccaggaggatggcaaggagagccgcatctctgtgcaggagcggcagtag

SEQ ID NO: 303 - DNA, 723 bp, Artificial Sequence
  Description of Artificial Sequence: Synthetic Transcript Sequence
atgattgagacctacaaccagaccagccccaggtctgctgccaccggcctgcccatctccatgaagatcttcatgtacctgctgactgtgttcctgatcacccagatgattggcagcgccctgtttgctgtgtacctgcaccggcggctggacaagattgaagatgaaagaaacctgcatgaagattttgtgttcatgaagaccatccagcgctgcaacacaggagagaggagcctgagcctgctgaactgtgaggagatcaagagccagtttgagggctttgtgaaggacatcatgctgaacaaggaggagaccaagaaggagaacagctttgagatgcagaaggtgctgcagtgggccgagaagggctactacaccatgagcaacaacctggtgaccctggagaatggcaagcagctgactgtgaagaggcagggcctgtactacatctatgcccaggtgaccttctgcagcaaccgggaggccagcagccaggcccccttcatcgccagcctgtgcctgaagagccctggccgctttgagcgcatcctgctgcgggccgccaacacccacagcagcgccaagccctgtggccagcagagcatccacctgggcggcgtgtttgagctgcagcccggggcctctgtgtttgtgaatgtgacagaccccagccaggtgagccacggcaccggcttcaccagctttggcctgctgaagctgtag

SEQ ID NO: 304 - DNA, 786 bp, Artificial Sequence
  Description of Artificial Sequence: Synthetic Transcript Sequence
atgattgagacctacaaccagaccagccccaggtctgctgccaccggcctgcccatctccatgaagatcttcatgtacctgctgactgtgttcctgatcacccagatgattggcagcgccctgtttgctgtgtacctgcaccggcggctggacaagattgaagatgaaagaaacctgcatgaagattttgtgttcatgaagaccatccagcgctgcaacacaggagagaggagcctgagcctgctgaactgtgaggagatcaagagccagtttgagggctttgtgaaggacatcatgctgaacaaggaggagaccaagaaggagaacagctttgagatgcagaagggggaccagaacccccagattgctgcccacgtgatcagcgaggccagcagcaagaccacctctgtgctgcagtgggccgagaagggctactacaccatgagcaacaacctggtgaccctggagaatggcaagcagctgactgtgaagaggcagggcctgtactacatctatgcccaggtgaccttctgcagcaaccgggaggccagcagccaggcccccttcatcgccagcctgtgcctgaagagccctggccgctttgagcgcatcctgctgcgggccgccaacacccacagcagcgccaagccctgtggccagcagagcatccacctgggcggcgtgtttgagctgcagcccggggcctctgtgtttgtgaatgtgacagaccccagccaggtgtcccatggaacaggcttcaccagctttggcctgctgaagctgtag

SEQ ID NO: 305 - DNA, 5169 bp, Artificial Sequence
  Description of Artificial Sequence: Synthetic Transcript Sequence
atgaggacaggctgggccaccccaagaagacctgctggcctgctgatgctgctcttctggttctttgacctggccgagcccagcggccgggccgccaatgaccccttcaccatcgtgcacggcaacacaggcaagtgcatcaagcctgtgtatggctggatcgtggctgatgactgtgatgaaacagaggacaagctgtggaagtgggtgtcccagcacaggctcttccacctgcacagccagaagtgcctgggcctggacatcaccaagtctgtgaatgagctgaggatgttcagctgtgacagcagcgccatgctgtggtggaagtgtgagcaccacagcctgtatggagctgcccgctaccgcctggccctgaaggatggccatggaacagccatcagcaatgccagtgatgtgtggaagaagggcggcagcgaggagagcctgtgtgaccagccctaccacgagatctacaccagagatggcaacagctatggccggccctgtgagttccccttcctgattgatggcacctggcaccacgactgcatcctggatgaggaccacagcggcccctggtgtgccaccaccctgaactatgaatatgacaggaagtggggcatctgcctgaagccagaaaatggctgtgaggacaactgggagaagaatgagcagtttggcagctgctaccagttcaacacccagacagccctgtcctggaaggaggcctacgtgtcctgccagaaccagggcgctgacctgctgagcatcaacagcgctgctgagctgacctacctgaaggagaaggagggcatcgccaagatcttctggattggcctgaaccagctgtacagcgcccggggctgggagtggagcgaccacaagcccctgaacttcctgaactgggaccctgaccggcccagcgcccccaccatcggcggcagcagctgtgccaggatggatgctgagagcggcctgtggcagagcttcagctgtgaggcccagctgccctacgtgtgcaggaagcccctgaacaacacagtggagctgacagatgtgtggacctacagcgacacccgctgtgatgctggctggctgcccaacaacggcttctgctacctgctggtgaatgaaagcaacagctgggacaaggcccacgccaagtgcaaggccttcagcagtgacctgatcagcatccacagcctggctgatgtggaggtggtggtgaccaagctgcacaatgaagacatcaaggaggaggtgtggattggcctgaagaacatcaacatccccaccctcttccagtggagcgatggaacagaggtgaccctgacctactgggatgaaaatgagcccaacgtgccctacaacaagacccccaactgtgtgtcctacctgggggagctgggccagtggaaggtgcagagctgtgaggagaagctgaagtatgtgtgcaagaggaagggggagaagctgaatgatgccagcagtgacaagatgtgccccccagatgagggctggaagagacatggagagacctgctacaagatctatgaagatgaggtgcccttcggcaccaactgcaacctgaccatcaccagcagatttgagcaggagtacctgaatgacctgatgaagaagtatgacaagagcctgaggaagtacttctggacaggcctgagagatgtggacagctgtggggagtacaactgggccaccgtgggcggcagaagaagagctgtgaccttcagcaactggaacttcctggagcccgccagccctgggggctgtgtggccatgagcacaggcaagtctgtgggcaagtgggaggtgaaggactgccgctccttcaaggccctgagcatctgcaagaagatgagcggccccctgggccctgaggaggccagccccaagccagatgacccctgcccagagggctggcagagcttccctgccagcctgagctgctacaaggtgttccacgccgagagaattgtgaggaagaggaactgggaggaggccgagcgcttctgccaggccctgggcgcccacctgagcagcttcagccacgtggatgagatcaaggagttcctgcacttcctgacagaccagttcagcggccagcactggctgtggattggcctgaacaagaggagcccagacctgcagggctcctggcagtggagcgacaggacccctgtgtccaccatcatcatgcccaatgagttccagcaggactatgacatccgggactgtgccgctgtgaaggtgttccaccggccctggaggcggggctggcacttctatgatgaccgggagttcatctacctgcggccctttgcctgtgacaccaagctggagtgggtgtgccagatccccaagggccgcacccccaagaccccagactggtacaacccagacagagctggcatccacggccccccactcatcatcgagggcagcgagtactggtttgtggccgacctgcacctgaactatgaggaggccgtgctgtactgtgccagcaaccacagcttcctggccaccatcaccagctttgtgggcctgaaggccatcaagaacaagatcgccaacatctctggagatggccagaagtggtggatccgcatcagcgagtggcccattgatgaccacttcacctacagccgctacccctggcaccgcttccctgtgaccttcggggaggagtgcctgtacatgtctgccaagacctggctgattgacctgggcaagcccacagactgcagcaccaagctgcccttcatctgtgagaagtacaacgtgagcagcctggagaagtacagcccagattctgctgccaaggtgcagtgcagcgagcagtggatccccttccagaacaagtgcttcctgaagatcaagcctgtgtccctgaccttcagccaggccagtgacacctgccacagctatggaggcaccctgcccagcgtgctgagccagatcgagcaggacttcatcaccagcctgctgcctgacatggaggccaccctgtggattggcctgcgctggacagcctatgagaagatcaacaagtggacagacaaccgggagctgacctacagcaacttccaccccctgctggtgtctggccgcctgcgcatccctgagaacttctttgaggaggagagccgctaccactgtgccctgatcctgaacctgcagaagagccccttcaccggcacctggaacttcaccagctgcagcgagcggcactttgtgtccctgtgccagaagtacagcgaggtgaagagccggcagaccctgcagaatgccagcgagaccgtgaagtacctgaacaacctgtacaagatcatccccaagaccctgacctggcacagcgccaagcgggagtgcctgaagagcaacatgcagctggtgtccatcacagacccctaccagcaggccttcctgtctgtgcaggccctgctgcacaacagcagcctgtggattggcctcttcagccaggatgatgagctgaactttggctggagcgatggcaagaggctgcacttcagccgctgggccgagaccaacggccagctggaggactgtgtggtgctggacacagatggcttctggaagacagtggactgcaatgacaaccagcccggggccatctgctactacagcggaaatgaaacagagaaggaggtgaagcctgtggacagcgtgaagtgccccagccctgtgctgaacaccccctggatccccttccagaactgctgctacaacttcatcatcaccaagaacagacacatggccaccacccaggatgaggtgcacaccaagtgccagaagctgaaccccaagagccacatcctgagcatcagagatgagaaggagaacaactttgtgctggagcagctgctgtacttcaactacatggcctcctgggtgatgctgggcatcacctacagaaacaagagcctgatgtggtttgacaagacccccctgagctacacccactggagggctggccggcccaccatcaagaatgagaagttcctggccggcctgagcacagatggcttctgggacatccagaccttcaaggtgattgaggaggccgtgtacttccaccagcacagcatcctggcctgcaagattgagatggtggactacaaggaggagtacaacaccaccctgccccagttcatgccctatgaagatggcatctacagcgtcatccagaagaaggtgacctggtatgaggccctgaacatgtgcagccagagcggcggccacctggcctctgtgcacaaccagaatggccagctgttcctggaggacatcgtgaagagagatggcttccccctgtgggtgggcctgagcagccatgatggcagcgagagcagctttgagtggagcgatggcagcacctttgactacatcccctggaagggccagaccagccctggcaactgtgtgctgctggaccccaagggcacctggaagcatgagaagtgcaacagcgtgaaggatggagccatctgctacaagcccaccaagagcaagaagctgagccggctgacctacagcagccgctgcccagctgccaaggaaaatggcagccgctggatccagtacaagggccactgctacaagagtgaccaggccctgcacagcttcagcgaggccaagaagctgtgcagcaagcatgaccacagcgccaccatcgtgtccatcaaggatgaagatgagaacaagtttgtgtcccggctgatgagggagaacaacaacatcaccatgagggtgtggctgggcctgagccagcacagcgtggaccagagctggagctggctggatggcagcgaggtgacctttgtgaagtgggagaacaagagcaagagcggcgtgggccgctgcagcatgctgattgccagcaatgagacctggaagaaggtggagtgtgagcacggcttcggccgggtggtgtgcaaggtgcccctgggccctgactacacagccatcgccatcatcgtggccaccctgagcatcctggtgctgatgggcggcctcatctggttcctgttccagaggcaccggctgcacctggccggcttcagctctgtgcgctatgcccagggcgtgaatgaagatgagatcatgctgcccagcttccatgactag

SEQ ID NO: 306 - DNA, 5454 bp, Artificial Sequence
  Description of Artificial Sequence: Synthetic Transcript Sequence
atgaggacaggctgggccaccccaagaagacctgctggcctgctgatgctgctcttctggttctttgacctggccgagcccagcggccgggccgccaatgaccccttcaccatcgtgcacggcaacacaggcaagtgcatcaagcctgtgtatggctggatcgtggctgatgactgtgatgaaacagaggacaagctgtggaagtgggtgtcccagcacaggctcttccacctgcacagccagaagtgcctgggcctggacatcaccaagtctgtgaatgagctgaggatgttcagctgtgacagcagcgccatgctgtggtggaagtgtgagcaccacagcctgtatggagctgcccgctaccgcctggccctgaaggatggccatggaacagccatcagcaatgccagtgatgtgtggaagaagggcggcagcgaggagagcctgtgtgaccagccctaccacgagatctacaccagagatggcaacagctatggccggccctgtgagttccccttcctgattgatggcacctggcaccacgactgcatcctggatgaggaccacagcggcccctggtgtgccaccaccctgaactatgaatatgacaggaagtggggcatctgcctgaagccagaaaatggctgtgaggacaactgggagaagaatgagcagtttggcagctgctaccagttcaacacccagacagccctgtcctggaaggaggcctacgtgtcctgccagaaccagggcgctgacctgctgagcatcaacagcgctgctgagctgacctacctgaaggagaaggagggcatcgccaagatcttctggattggcctgaaccagctgtacagcgcccggggctgggagtggagcgaccacaagcccctgaacttcctgaactgggaccctgaccggcccagcgcccccaccatcggcggcagcagctgtgccaggatggatgctgagagcggcctgtggcagagcttcagctgtgaggcccagctgccctacgtgtgcaggaagcccctgaacaacacagtggagctgacagatgtgtggacctacagcgacacccgctgtgatgctggctggctgcccaacaacggcttctgctacctgctggtgaatgaaagcaacagctgggacaaggcccacgccaagtgcaaggccttcagcagtgacctgatcagcatccacagcctggctgatgtggaggtggtggtgaccaagctgcacaatgaagacatcaaggaggaggtgtggattggcctgaagaacatcaacatccccaccctcttccagtggagcgatggaacagaggtgaccctgacctactgggatgaaaatgagcccaacgtgccctacaacaagacccccaactgtgtgtcctacctgggggagctgggccagtggaaggtgcagagctgtgaggagaagctgaagtatgtgtgcaagaggaagggggagaagctgaatgatgccagcagtgacaagatgtgccccccagatgagggctggaagagacatggagagacctgctacaagatctatgaagatgaggtgcccttcggcaccaactgcaacctgaccatcaccagcagatttgagcaggagtacctgaatgacctgatgaagaagtatgacaagagcctgaggaagtacttctggacaggcctgagagatgtggacagctgtggggagtacaactgggccaccgtgggcggcagaagaagagctgtgaccttcagcaactggaacttcctggagcccgccagccctgggggctgtgtggccatgagcacaggcaagtctgtgggcaagtgggaggtgaaggactgccgctccttcaaggccctgagcatctgcaagaagatgagcggccccctgggccctgaggaggccagccccaagccagatgacccctgcccagagggctggcagagcttccctgccagcctgagctgctacaaggtgttccacgccgagagaattgtgaggaagaggaactgggaggaggccgagcgcttctgccaggccctgggcgcccacctgagcagcttcagccacgtggatgagatcaaggagttcctgcacttcctgacagaccagttcagcggccagcactggctgtggattggcctgaacaagaggagcccagacctgcagggctcctggcagtggagcgacaggacccctgtgtccaccatcatcatgcccaatgagttccagcaggactatgacatccgggactgtgccgctgtgaaggtgttccaccggccctggaggcggggctggcacttctatgatgaccgggagttcatctacctgcggccctttgcctgtgacaccaagctggagtgggtgtgccagatccccaagggccgcacccccaagaccccagactggtacaacccagacagagctggcatccacggccccccactcatcatcgagggcagcgagtactggtttgtggccgacctgcacctgaactatgaggaggccgtgctgtactgtgccagcaaccacagcttcctggccaccatcaccagctttgtgggcctgaaggccatcaagaacaagatcgccaacatctctggagatggccagaagtggtggatccgcatcagcgagtggcccattgatgaccacttcacctacagccgctacccctggcaccgcttccctgtgaccttcggggaggagtgcctgtacatgtctgccaagacctggctgattgacctgggcaagcccacagactgcagcaccaagctgcccttcatctgtgagaagtacaacgtgagcagcctggagaagtacagcccagattctgctgccaaggtgcagtgcagcgagcagtggatccccttccagaacaagtgcttcctgaagatcaagcctgtgtccctgaccttcagccaggccagtgacacctgccacagctatggaggcaccctgcccagcgtgctgagccagatcgagcaggacttcatcaccagcctgctgcctgacatggaggccaccctgtggattggcctgcgctggacagcctatgagaagatcaacaagtggacagacaaccgggagctgacctacagcaacttccaccccctgctggtgtctggccgcctgcgcatccctgagaacttctttgaggaggagagccgctaccactgtgccctgatcctgaacctgcagaagagccccttcaccggcacctggaacttcaccagctgcagcgagcggcactttgtgtccctgtgccagaagtacagcgaggtgaagagccggcagaccctgcagaatgccagcgagaccgtgaagtacctgaacaacctgtacaagatcatccccaagaccctgacctggcacagcgccaagcgggagtgcctgaagagcaacatgcagctggtgtccatcacagacccctaccagcaggccttcctgtctgtgcaggccctgctgcacaacagcagcctgtggattggcctcttcagccaggatgatgagctgaactttggctggagcgatggcaagaggctgcacttcagccgctgggccgagaccaacggccagctggaggactgtgtggtgctggacacagatggcttctggaagacagtggactgcaatgacaaccagcccggggccatctgctactacagcggaaatgaaacagagaaggaggtgaagcctgtggacagcgtgaagtgccccagccctgtgctgaacaccccctggatccccttccagaactgctgctacaacttcatcatcaccaagaacagacacatggccaccacccaggatgaggtgcacaccaagtgccagaagctgaaccccaagagccacatcctgagcatcagagatgagaaggagaacaactttgtgctggagcagctgctgtacttcaactacatggcctcctgggtgatgctgggcatcacctacagaaacaagagcctgatgtggtttgacaagacccccctgagctacacccactggagggctggccggcccaccatcaagaatgagaagttcctggccggcctgagcacagatggcttctgggacatccagaccttcaaggtgattgaggaggccgtgtacttccaccagcacagcatcctggcctgcaagattgagatggtggactacaaggaggagtacaacaccaccctgccccagttcatgccctatgaagatggcatctacagcgtcatccagaagaaggtgacctggtatgaggccctgaacatgtgcagccagagcggcggccacctggcctctgtgcacaaccagaatggccagctgttcctggaggacatcgtgaagagagatggcttccccctgtgggtgggcctgagcagccatgatggcagcgagagcagctttgagtggagcgatggcagcacctttgactacatcccctggaagggccagaccagccctggcaactgtgtgctgctggaccccaagggcacctggaagcatgagaagtgcaacagcgtgaaggatggagccatctgctacaagcccaccaagagcaagaagctgagccggctgacctacagcagccgctgcccagctgccaaggaaaatggcagccgctggatccagtacaagggccactgctacaagagtgaccaggccctgcacagcttcagcgaggccaagaagctgtgcagcaagcatgaccacagcgccaccatcgtgtccatcaaggatgaagatgagaacaagtttgtgtcccggctgatgagggagaacaacaacatcaccatgagggtgtggctgggcctgagccagcacagcgtggactgccccagcagcacctggatccagttccaggacagctgctacatcttcctgcaggaggccatcaaggtggagagcattgaagatgtgaggaaccagtgcacagaccacggggctgacatgatcagcatccacaatgaggaggagaatgccttcatcctggacaccctgaagaagcagtggaagggcccagatgacatcctgctgggcatgttttatgacacagatgatgccagcttcaagtggtttgacaacagcaacatgacctttgacaagtggacagaccaggatgatgatgaggacctggtggacacctgtgccttcctgcacatcaagacaggagagtggaagaagggcaactgtgaggtgtcctctgtggagggcaccctgtgcaagacagccatcccctacaagaggaagtacctgagtgacaaccacatcctgatcagcgccctggtgattgccagcaccgtcatcctgactgtgctgggcgccatcatctggttcctgtacaagaagcacagcgacagccgcttcaccaccgtcttcagcacagccccccagagcccctacaatgaagactgtgtgctggtggtgggggaggagaatgagtaccctgtgcagtttgattag

SEQ ID NO: 307 - DNA, 5622 bp, Artificial Sequence
  Description of Artificial Sequence: Synthetic Transcript Sequence
atgaggacaggctgggccaccccaagaagacctgctggcctgctgatgctgctcttctggttctttgacctggccgagcccagcggccgggccgccaatgaccccttcaccatcgtgcacggcaacacaggcaagtgcatcaagcctgtgtatggctggatcgtggctgatgactgtgatgaaacagaggacaagctgtggaagtgggtgtcccagcacaggctcttccacctgcacagccagaagtgcctgggcctggacatcaccaagtctgtgaatgagctgaggatgttcagctgtgacagcagcgccatgctgtggtggaagtgtgagcaccacagcctgtatggagctgcccgctaccgcctggccctgaaggatggccatggaacagccatcagcaatgccagtgatgtgtggaagaagggcggcagcgaggagagcctgtgtgaccagccctaccacgagatctacaccagagatggcaacagctatggccggccctgtgagttccccttcctgattgatggcacctggcaccacgactgcatcctggatgaggaccacagcggcccctggtgtgccaccaccctgaactatgaatatgacaggaagtggggcatctgcctgaagccagaaaatggctgtgaggacaactgggagaagaatgagcagtttggcagctgctaccagttcaacacccagacagccctgtcctggaaggaggcctacgtgtcctgccagaaccagggcgctgacctgctgagcatcaacagcgctgctgagctgacctacctgaaggagaaggagggcatcgccaagatcttctggattggcctgaaccagctgtacagcgcccggggctgggagtggagcgaccacaagcccctgaacttcctgaactgggaccctgaccggcccagcgcccccaccatcggcggcagcagctgtgccaggatggatgctgagagcggcctgtggcagagcttcagctgtgaggcccagctgccctacgtgtgcaggaagcccctgaacaacacagtggagctgacagatgtgtggacctacagcgacacccgctgtgatgctggctggctgcccaacaacggcttctgctacctgctggtgaatgaaagcaacagctgggacaaggcccacgccaagtgcaaggccttcagcagtgacctgatcagcatccacagcctggctgatgtggaggtggtggtgaccaagctgcacaatgaagacatcaaggaggaggtgtggattggcctgaagaacatcaacatccccaccctcttccagtggagcgatggaacagaggtgaccctgacctactgggatgaaaatgagcccaacgtgccctacaacaagacccccaactgtgtgtcctacctgggggagctgggccagtggaaggtgcagagctgtgaggagaagctgaagtatgtgtgcaagaggaagggggagaagctgaatgatgccagcagtgacaagatgtgccccccagatgagggctggaagagacatggagagacctgctacaagatctatgaagatgaggtgcccttcggcaccaactgcaacctgaccatcaccagcagatttgagcaggagtacctgaatgacctgatgaagaagtatgacaagagcctgaggaagtacttctggacaggcctgagagatgtggacagctgtggggagtacaactgggccaccgtgggcggcagaagaagagctgtgaccttcagcaactggaacttcctggagcccgccagccctgggggctgtgtggccatgagcacaggcaagtctgtgggcaagtgggaggtgaaggactgccgctccttcaaggccctgagcatctgcaagaagatgagcggccccctgggccctgaggaggccagccccaagccagatgacccctgcccagagggctggcagagcttccctgccagcctgagctgctacaaggtgttccacgccgagagaattgtgaggaagaggaactgggaggaggccgagcgcttctgccaggccctgggcgcccacctgagcagcttcagccacgtggatgagatcaaggagttcctgcacttcctgacagaccagttcagcggccagcactggctgtggattggcctgaacaagaggagcccagacctgcagggctcctggcagtggagcgacaggacccctgtgtccaccatcatcatgcccaatgagttccagcaggactatgacatccgggactgtgccgctgtgaaggtgttccaccggccctggaggcggggctggcacttctatgatgaccgggagttcatctacctgcggccctttgcctgtgacaccaagctggagtgggtgtgccagatccccaagggccgcacccccaagaccccagactggtacaacccagacagagctggcatccacggccccccactcatcatcgagggcagcgagtactggtttgtggccgacctgcacctgaactatgaggaggccgtgctgtactgtgccagcaaccacagcttcctggccaccatcaccagctttgtgggcctgaaggccatcaagaacaagatcgccaacatctctggagatggccagaagtggtggatccgcatcagcgagtggcccattgatgaccacttcacctacagccgctacccctggcaccgcttccctgtgaccttcggggaggagtgcctgtacatgtctgccaagacctggctgattgacctgggcaagcccacagactgcagcaccaagctgcccttcatctgtgagaagtacaacgtgagcagcctggagaagtacagcccagattctgctgccaaggtgcagtgcagcgagcagtggatccccttccagaacaagtgcttcctgaagatcaagcctgtgtccctgaccttcagccaggccagtgacacctgccacagctatggaggcaccctgcccagcgtgctgagccagatcgagcaggacttcatcaccagcctgctgcctgacatggaggccaccctgtggattggcctgcgctggacagcctatgagaagatcaacaagtggacagacaaccgggagctgacctacagcaacttccaccccctgctggtgtctggccgcctgcgcatccctgagaacttctttgaggaggagagccgctaccactgtgccctgatcctgaacctgcagaagagccccttcaccggcacctggaacttcaccagctgcagcgagcggcactttgtgtccctgtgccagaagtacagcgaggtgaagagccggcagaccctgcagaatgccagcgagaccgtgaagtacctgaacaacctgtacaagatcatccccaagaccctgacctggcacagcgccaagcgggagtgcctgaagagcaacatgcagctggtgtccatcacagacccctaccagcaggccttcctgtctgtgcaggccctgctgcacaacagcagcctgtggattggcctcttcagccaggatgatgagctgaactttggctggagcgatggcaagaggctgcacttcagccgctgggccgagaccaacggccagctggaggactgtgtggtgctggacacagatggcttctggaagacagtggactgcaatgacaaccagcccggggccatctgctactacagcggaaatgaaacagagaaggaggtgaagcctgtggacagcgtgaagtgccccagccctgtgctgaacaccccctggatccccttccagaactgctgctacaacttcatcatcaccaagaacagacacatggccaccacccaggatgaggtgcacaccaagtgccagaagctgaaccccaagagccacatcctgagcatcagagatgagaaggagaacaactttgtgctggagcagctgctgtacttcaactacatggcctcctgggtgatgctgggcatcacctacagaaacaagagcctgatgtggtttgacaagacccccctgagctacacccactggagggctggccggcccaccatcaagaatgagaagttcctggccggcctgagcacagatggcttctgggacatccagaccttcaaggtgattgaggaggccgtgtacttccaccagcacagcatcctggcctgcaagattgagatggtggactacaaggaggagtacaacaccaccctgccccagttcatgccctatgaagatggcatctacagcgtcatccagaagaaggtgacctggtatgaggccctgaacatgtgcagccagagcggcggccacctggcctctgtgcacaaccagaatggccagctgttcctggaggacatcgtgaagagagatggcttccccctgtgggtgggcctgagcagccatgatggcagcgagagcagctttgagtggagcgatggcagcacctttgactacatcccctggaagggccagaccagccctggcaactgtgtgctgctggaccccaagggcacctggaagcatgagaagtgcaacagcgtgaaggatggagccatctgctacaagcccaccaagagcaagaagctgagccggctgacctacagcagccgctgcccagctgccaaggaaaatggcagccgctggatccagtacaagggccactgctacaagagtgaccaggccctgcacagcttcagcgaggccaagaagctgtgcagcaagcatgaccacagcgccaccatcgtgtccatcaaggatgaagatgagaacaagtttgtgtcccggctgatgagggagaacaacaacatcaccatgagggtgtggctgggcctgagccagcacagcgtggaccagagctggagctggctggatggcagcgaggtgacctttgtgaagtgggagaacaagagcaagagcggcgtgggccgctgcagcatgctgattgccagcaatgagacctggaagaaggtggagtgtgagcacggcttcggccgggtggtgtgcaaggtgcccctggactgccccagcagcacctggatccagttccaggacagctgctacatcttcctgcaggaggccatcaaggtggagagcattgaagatgtgaggaaccagtgcacagaccacggggctgacatgatcagcatccacaatgaggaggagaatgccttcatcctggacaccctgaagaagcagtggaagggcccagatgacatcctgctgggcatgttttatgacacagatgatgccagcttcaagtggtttgacaacagcaacatgacctttgacaagtggacagaccaggatgatgatgaggacctggtggacacctgtgccttcctgcacatcaagacaggagagtggaagaagggcaactgtgaggtgtcctctgtggagggcaccctgtgcaagacagccatcccctacaagaggaagtacctgagtgacaaccacatcctgatcagcgccctggtgattgccagcaccgtcatcctgactgtgctgggcgccatcatctggttcctgtacaagaagcacagcgacagccgcttcaccaccgtcttcagcacagccccccagagcccctacaatgaagactgtgtgctggtggtgggggaggagaatgagtaccctgtgcagtttgattag

SEQ ID NO: 308 - DNA, 186 bp, Artificial Sequence
  Description of Artificial Sequence: Synthetic Transcript Sequence
atgaagcgcttcctgttcctgctgctgaccatcagcctgctggtgatggtgcagatccagacaggcctgagcggccagaatgacaccagccagaccagcagccccagcgccagcagcaacatcagcggcggcatcttcctgttctttgtggccaatgccatcatccacctgttctgcttctcctag

SEQ ID NO: 309 - DNA, 1062 bp, Artificial Sequence
  Description of Artificial Sequence: Synthetic Transcript Sequence
atggagctgacagagctgctgctggtggtgatgctgctgctgacagcccggctgaccctgagcagccctgcccccccagcctgtgacctgcgggtgctgagcaagctgctgcgggacagccacgtgctgcacagccggctgagccagtgcccagaggtgcaccccctgcccacccctgtgctgctgcctgctgtggacttcagcctgggggagtggaagacccagatggaggagaccaaggcccaggacatcctgggcgctgtgaccctgctgctggagggcgtgatggccgcccggggccagctgggccccacctgcctgagcagcctgctgggccagctgagcggccaggtgcggctgctgctgggcgccctgcagagcctgctgggcacccagctgcccccccagggccgcaccacagcccacaaggaccccaatgccatcttcctgtccttccagcacctgctgcggggcaaggtgcgcttcctgatgctggtgggcggcagcaccctgtgtgtgcggcgggccccacccaccacagctgtgcccagcaggaccagcctggtgctgaccctgaatgagctgcccaacagaaccagcggcctgctggagaccaacttcaccgccagcgcccggaccaccggcagcggcctgctgaagtggcagcagggcttccgggccaagatccctggcctgctgaaccagaccagccgcagcctggaccagatccctggctacctgaaccgcatccacgagctgctgaatggcacccggggcctcttccctggccccagcaggaggaccctgggcgccccagacatcagcagcggcaccagtgacaccggcagcctgccccccaacctgcagcccggctacagccccagccccacccaccccccaacaggccagtacaccctcttccccctgccccccaccctgcccacccctgtggtgcagctgcaccccctgctgcctgaccccagcgcccccacccccacccccaccagccccctgctgaacaccagctacacccacagccagaacctgagccaggagggctag

SEQ ID NO: 310 - DNA, 537 bp, Artificial Sequence
  Description of Artificial Sequence: Synthetic Transcript Sequence
atgacagtgctggccccagcctggagccccaccacctacctgctgctgctgctgctgctgagcagcggcctgagcggcacccaggactgcagcttccagcacagccccatcagcagtgactttgctgtgaagatccgggagctgagtgactacctgctgcaggactaccctgtgacagtggccagcaacctgcaggatgaggagctgtgtggcggcctgtggaggctggtgctggcccagcgctggatggagcggctgaagacagtggccggcagcaagatgcagggcctgctggagcgggtgaacacagagatccactttgtgaccaagtgtgccttccagcccccacccagctgcctgcgctttgtgcagaccaacatcagccggctgctgcaggagaccagcgagcagctggtggccctgaagccctggatcacccggcagaacttcagccgctgcctggagctgcagtgccagcctgtggagaccgtcttccaccgggtgtcccaggacggcctggacctgctgaccagctag

SEQ ID NO: 311 - DNA, 708 bp, Artificial Sequence
  Description of Artificial Sequence: Synthetic Transcript Sequence
atgacagtgctggccccagcctggagccccaccacctacctgctgctgctgctgctgctgagcagcggcctgagcggcacccaggactgcagcttccagcacagccccatcagcagtgactttgctgtgaagatccgggagctgagtgactacctgctgcaggactaccctgtgacagtggccagcaacctgcaggatgaggagctgtgtggcggcctgtggaggctggtgctggcccagcgctggatggagcggctgaagacagtggccggcagcaagatgcagggcctgctggagcgggtgaacacagagatccactttgtgaccaagtgtgccttccagcccccacccagctgcctgcgctttgtgcagaccaacatcagccggctgctgcaggagaccagcgagcagctggtggccctgaagccctggatcacccggcagaacttcagccgctgcctggagctgcagtgccagcctgacagcagcaccctgcccccaccctggagcccccggcccctggaggccacagcccccacagccccccagccccccctgctgctgctgctgctgctgcctgtgggcctgctgctgctggccgccgcctggtgcctgcactggcagaggaccaggaggaggacccccaggcctggagagcaggtgccccctgtgcccagcccccaggacctgctgctggtggagcactag

SEQ ID NO: 312 - DNA, 1110 bp, Artificial Sequence
  Description of Artificial Sequence: Synthetic Transcript Sequence
atggtgtgggcccccctgggcccccccaggacagactgcctgaccctgctgcacacccccagcaaggacagccccaagatgagcctggagtggctggtggcctggagctggagcctggatggcctgcgggactgcatcgccaccggcatccagagcgtgcgggactgtgacaccacagctgtgatcaccgtggcctgcctgctggtgctgtttgtgtggtactgctaccacgtgggccgggagcagccccggccctacgtgtctgtgaacagcctgatgcaggccgcagatgccaacggcctgcagaatggctacgtgtactgccagagcccagaatgtgtgcgctgcacccacaatgaaggcctgaaccagaagctgtaccacaacctgcaggagtatgccaagcgctacagctggagcggcatgggccgcatccacaagggcatccgggagcagggccgctacctgaacagccggcccagcatccagaagccagaggtgttcttcctgcctgacctgcccaccaccccctacttcagcagagatgcccagaagcatgatgtggaggtgctggagaggaacttccagaccatcctgtgtgaatttgagaccctgtacaaggccttcagcaactgcagcctgccccagggctggaagatgaacagcaccccatctggagagtggttcaccttctacctggtgaaccagggcgtgtgtgtgcccaggaactgcaggaagtgccccaggacctaccgcctgctgggcagcctgcggacctgcatcggcaacaacgtgtttggaaatgcctgcatctctgtgctgagccctggcaccgtcatcacagagcactacggccccaccaacatccgcatccgctgccacctgggcctgaagaccccaaatggctgtgagctggtggtgggcggggagccccagtgctgggccgagggccgctgcctgctgtttgatgacagcttcctgcatgctgccttccacgagggcagcgcagaagatggcccccgggtggtgttcatggtggacctgtggcaccccaacgtggccgctgctgagcggcaggccctggacttcatctttgcccctggaagatag

SEQ ID NO: 313 - DNA, 1989 bp, Artificial Sequence
  Description of Artificial Sequence: Synthetic Transcript Sequence
atgaggccccagatcctgctgctgctggccctgctgaccctgggcctggccgcccagcaccaggacaaggtgccctgcaagatggtggacaagaaggtgtcctgccaggtgctgggcctgctgcaggtgcccagcgtgctgcccccagacacagagaccctggacctgagcggcaaccagctgcggagcatcctggccagccccctgggcttctacacagccctgcggcacctggacctgagcaccaatgagatctccttcctgcagcccggggccttccaggccctgacccacctggagcacctgagcctggcccacaaccggctggccatggccacagccctgtctgctgggggcctgggccccctgccccgggtgaccagcctggacctgagcggcaacagcctgtacagcggcctgctggagcggctgctgggggaggcccccagcctgcacaccctgagcctggccgagaacagcctgacccggctgaccaggcacaccttccgggacatgcctgccctggagcagctggacctgcacagcaatgtgctgatggacattgaagatggagcctttgagggcctgccccggctgacccacctgaacctgagcaggaacagcctgacctgcatcagtgacttcagcctgcagcagctgcgggtgctggacctgagctgcaacagcattgaggccttccagacagccagccagccccaggccgagttccagctgacctggctggacctgcgggagaacaagctgctgcacttcccagacctggccgccctgcccaggctcatctacctgaacctgagcaacaacctgatccggctgcccactggaccaccccaggacagcaagggcatccacgcccccagcgagggctggagcgccctgcccctgagcgcccccagcggaaatgccagcggccggcccctgagccagctgctgaacctggacctgagctacaatgaaattgagctgatcccagacagcttcctggagcacctgaccagcctgtgcttcctgaacctgagcaggaactgcctgcggacctttgaggcccggcggctgggcagcctgccctgcctgatgctgctggacctgagccacaatgccctggagaccctggagctgggcgcccgggccctgggcagcctgcggaccctgctgctgcagggcaatgccctgcgggacctgcccccctacacctttgccaacctggccagcctgcagaggctgaacctgcagggcaacagagtgagcccctgtggcggcccagatgagcccggccccagcggctgtgtggccttcagcggcatcaccagcctgcggagcctgagcctggtggacaatgaaattgagctgctgcgggccggggccttcctgcacacccccctgacagagctggacctgagcagcaaccctggcctggaggtggccactggagccctgggcggcctggaggccagcctggaggtgctggccctgcagggcaatggcctgatggtgctgcaggtggacctgccctgcttcatctgcctgaagaggctgaacctggctgaaaatcggctgagccacctgcctgcctggacccaggccgtgtccctggaggtgctggacctgaggaacaacagcttcagcctgctgcccggcagcgccatgggcggcctggagaccagcctgcggcggctgtacctgcagggcaaccccctgagctgctgcggaaatggctggctggccgcccagctgcaccagggccgggtggatgtggatgccacccaggacctgatctgccgcttcagcagccaggaggaggtgtccctgagccacgtgcggcctgaggactgtgagaagggcggcctgaagaacatcaacctgatcatcatcctgaccttcatcctggtgtctgccatcctgctgaccaccctggccgcctgctgctgcgtgcggcggcagaagttcaaccagcagtacaaggcctag

SEQ ID NO: 314 - DNA, 1989 bp, Artificial Sequence; identical to SEQ ID NO: 313
  Description of Artificial Sequence: Synthetic Transcript Sequence

SEQ ID NO: 315 - DNA, 1989 bp, Artificial Sequence; identical to SEQ ID NO: 313
  Description of Artificial Sequence: Synthetic Transcript Sequence

SEQ ID NO: 316 - DNA, 561 bp, Artificial Sequence
  Description of Artificial Sequence: Synthetic Transcript Sequence
atgaggccccagatcctgctgctgctggccctgctgaccctgggcctggccgcccagcaccaggacaaggtgccctgcaagatggtggacaagaaggtgtcctgccaggtgctgggcctgctgcaggtgcccagcgtgctgcccccagacacagagaccctggacctgagcggcaaccagctgcggagcatcctggccagccccctgggcttctacacagccctgcggcacctggacctgagcaccaatgagatctccttcctgcagcccggggccttccaggccctgacccacctggagcacctgagcctggcccacaaccggctggccatggccacagccctgtctgctgggggcctgggccccctgccccgggtgaccagcctggacctgagcggcaacagcctgtacagcggcctgctggagcggctgctgggggaggcccccagcctgcacaccctgagcctggccgagaacagcctgacccggctgaccaggcacaccttccgggacatgcctgccctggagcagctggacctgcacagcaatgtgctgatgtag

SEQ ID NO: 317 - DNA, 1212 bp, Artificial Sequence
  Description of Artificial Sequence: Synthetic Transcript Sequence
atggcccacgccatggagaacagctggaccatcagcaaggagtaccacattgatgaggaggtgggctttgccctgcccaacccccaggagaacctgcctgacttctacaatgactggatgttcatcgccaagcacctgcctgacctgattgagagcggccagctgcgggagcgggtggagaagctgaacatgctgagcattgaccacctgacagaccacaagagccagaggctggcccggctggtgctgggctgcatcaccatggcctacgtgtggggcaagggccatggagatgtgaggaaggtgctgcccagaaatattgctgtgccctactgccagctgagcaagaagctggagctgccccccatcctggtgtatgctgactgtgtgctggccaactggaagaagaaggaccccaacaagcccctgacctatgagaacatggatgtgctcttctccttcagagatggagactgcagcaagggcttcttcctggtgtccctgctggtggagattgctgctgccagcgccatcaaggtgatccccaccgtcttcaaggccatgcagatgcaggagcgggacaccctgctgaaggccctgctggagatcgccagctgcctggagaaggccctgcaggtgttccaccagatccatgaccacgtgaaccccaaggccttcttctctgtgctgcgcatctacctgagcggctggaagggcaacccccagctgagtgatggcctggtgtatgagggcttctgggaggaccccaaggagtttgctgggggcagcgctggccagagcagcgtcttccagtgctttgatgtgctgctgggcatccagcagacagctgggggcggccacgccgcccagttcctgcaggacatgaggcgctacatgcccccagcccacaggaacttcctgtgcagcctggagagcaaccccagcgtgcgggagtttgtgctgagcaaaggagatgctggcctgcgggaggcctatgatgcctgtgtgaaggccctggtgtccctgcggagctaccacctgcagatcgtgaccaagtacatcctgatcccagccagccagcagcccaaggagaacaagaccagcgaggaccccagcaagctggaggccaagggcactggaggaacagacctgatgaacttcctgaagacagtgcgcagcaccacagagaagagcctgctgaaggagggctag

SEQ ID NO: 318 - DNA, 237 bp, Artificial Sequence
  Description of Artificial Sequence: Synthetic Transcript Sequence
atggcccacgccatggagaacagctggaccatcagcaaggagtaccacattgatgaggaggtgggctttgccctgcccaacccccaggagaacctgcctgacttctacaatgactggatgttcatcgccaagcacctgcctgacctgattgagagcggccagctgcgggagcgggtggagaagctgaacatgctgagcattgaccacctgacagaccacaagagccagaggctgtag

SEQ ID NO: 319 - DNA, 543 bp, Artificial Sequence
  Description of Artificial Sequence: Synthetic Transcript Sequence
atggcccacgccatggagaacagctggaccatcagcaaggagtaccacattgatgaggaggtgggctttgccctgcccaacccccaggagaacctgcctgacttctacaatgactggatgttcatcgccaagcacctgcctgacctgattgagagcggccagctgcgggagcgggtggagaagctgaacatgctgagcattgaccacctgacagaccacaagagccagaggctggcccggctggtgctgggctgcatcaccatggcctacgtgtggggcaagggccatggagatgtgaggaaggtgctgcccagaaatattgctgtgccctactgccagctgagcaagaagctggagctgccccccatcctggtgtatgctgactgtgtgctggccaactggaagaagaaggaccccaacaagcccctgacctatgagaacatggatgtgctcttctccttcagagatggagactgcagcaagggcttcttcctggtgtccctgctggtggagattgctgctgccagcgccatcaaggtgtag

SEQ ID NO: 320 - DNA, 1212 bp, Artificial Sequence; identical to SEQ ID NO: 317
  Description of Artificial Sequence: Synthetic Transcript Sequence

SEQ ID NO: 321 - DNA, 144 bp, Artificial Sequence
  Description of Artificial Sequence: Synthetic Transcript Sequence
atggcccacgccatggagaacagctggaccatcagcaaggagtaccacattgatgaggaggtgggctttgccctgcccaacccccaggagaacctgcctgacttctacaatgactggatgttcatcgccaagcacctgccctag

SEQ ID NO: 322 - DNA, 1224 bp, Artificial Sequence
  Description of Artificial Sequence: Synthetic Transcript Sequence
atggagccccaccggcccaacgtgaagacagctgtgcccctgagcctggagagctaccacatcagcgaggagtatggcttcctgctgcctgacagcctgaaggagctgcctgaccactaccggccctggatggagatcgccaacaagctgccccagctgattgatgcccaccagctgcaggcccacgtggacaagatgcccctgctgagctgccagttcctgaagggccaccgggagcagaggctggcccacctggtgctgtccttcctgaccatgggctacgtgtggcaggagggggaggcccagcctgctgaggtgctgcccaggaacctggccctgccctttgtggaggtgtccaggaacctgggcctgccccccatcctggtgcacagcgacctggtgctgaccaactggaccaagaaggaccctgatggcttcctggagatcggcaacctggagaccatcatctccttccctggaggagagagcctgcacggcttcatcctggtgacagccctggtggagaaggaggccgtgcccggcatcaaggccctggtgcaggccaccaatgccatcctgcagcccaaccaggaggccctgctgcaggccctgcagaggctgcggctgagcatccaggacatcaccaagaccctgggccagatgcatgactatgtggaccctgacatcttctacgccggcatccgcatcttcctgagcggctggaaggacaacccagccatgcctgctggcctgatgtatgaaggagtgtcccaggagcccctgaagtacagcggcggcagcgctgcccagagcacagtgctgcacgcctttgatgagttcctgggcatccgccacagcaaggagagcggggacttcctgtacaggatgagggactacatgccacccagccacaaggccttcatcgaggacatccacagcgcccccagcctgcgggactacatcctgagcagcggccaggaccacctgctgacagcctacaaccagtgtgtgcaggccctggccgagctgcggagctaccacatcaccatggtgaccaagtacctgatcacagctgctgccaaggccaagcacggcaagcccaaccacctgcccggccccccccaggccctgaaggaccggggcaccggcggcacagctgtgatgtccttcctgaagtctgtgcgggacaagaccctggagagcatcctgcacccccggggctag

SEQ ID NO: 323 - DNA, 1263 bp, Artificial Sequence
  Description of Artificial Sequence: Synthetic Transcript Sequence
atgctgcacttccactactatgacaccagcaacaagatcatggagccccaccggcccaacgtgaagacagctgtgcccctgagcctggagagctaccacatcagcgaggagtatggcttcctgctgcctgacagcctgaaggagctgcctgaccactaccggccctggatggagatcgccaacaagctgccccagctgattgatgcccaccagctgcaggcccacgtggacaagatgcccctgctgagctgccagttcctgaagggccaccgggagcagaggctggcccacctggtgctgtccttcctgaccatgggctacgtgtggcaggagggggaggcccagcctgctgaggtgctgcccaggaacctggccctgccctttgtggaggtgtccaggaacctgggcctgccccccatcctggtgcacagcgacctggtgctgaccaactggaccaagaaggaccctgatggcttcctggagatcggcaacctggagaccatcatctccttccctggaggagagagcctgcacggcttcatcctggtgacagccctggtggagaaggaggccgtgcccggcatcaaggccctggtgcaggccaccaatgccatcctgcagcccaaccaggaggccctgctgcaggccctgcagaggctgcggctgagcatccaggacatcaccaagaccctgggccagatgcatgactatgtggaccctgacatcttctacgccggcatccgcatcttcctgagcggctggaaggacaacccagccatgcctgctggcctgatgtatgagggcgtgtcccaggagcccctgaagtacagcggcggcagcgctgcccagagcacagtgctgcacgcctttgatgagttcctgggcatccgccacagcaaggagagcggggacttcctgtacaggatgagggactacatgccacccagccacaaggccttcatcgaggacatccacagcgcccccagcctgcgggactacatcctgagcagcggccaggaccacctgctgacagcctacaaccagtgtgtgcaggccctggccgagctgcggagctaccacatcaccatggtgaccaagtacctgatcacagctgctgccaaggccaagcacggcaagcccaaccacctgcccggccccccccaggccctgaaggaccggggcactggaggaacagctgtgatgtccttcctgaagtctgtgcgggacaagaccctggagagcatcctgcacccccggggctag

SEQ ID NO: 324 - DNA, 537 bp, Artificial Sequence
  Description of Artificial Sequence: Synthetic Transcript Sequence
atgcacagcagcgccctgctgtgctgcctggtgctgctgactggagtgcgggccagccctggccagggcacccagagcgagaacagctgcacccacttccctggcaacctgcccaacatgctgcgggacctgagagatgccttcagccgggtgaagaccttcttccagatgaaggaccagctggacaacctgctgctgaaggagagcctgctggaggacttcaagggctacctgggctgccaggccctgtctgagatgatccagttctacctggaggaggtgatgccccaggccgagaaccaggaccctgacatcaaggcccacgtgaacagcctgggggagaacctgaagaccctgcggctgcggctgcggcgctgccaccgcttcctgccctgtgagaacaagagcaaggctgtggagcaggtgaagaatgccttcaacaagctgcaggagaagggcatctacaaggccatgtctgaatttgacatcttcatcaactacatcgaggcctacatgaccatgaagatcagaaattag

SEQ ID NO: 325 - DNA, 762 bp, Artificial Sequence
  Description of Artificial Sequence: Synthetic Transcript Sequence
atgtggcccccaggcagcgccagccagcccccacccagccctgctgctgccaccggcctgcaccctgctgcccggcctgtgtccctgcagtgccgcctgtccatgtgcccagcccggagcctgctgctggtggccaccctggtgctgctggaccacctgagcctggccaggaacctgcctgtggccaccccagaccccggcatgttcccctgcctgcaccacagccagaacctgctgcgggctgtgagcaacatgctgcagaaggcccggcagaccctggagttctacccctgcaccagcgaggagattgaccacgaggacatcaccaaggacaagaccagcacagtggaggcctgcctgcccctggagctgaccaagaatgaaagctgcctgaacagccgggagaccagcttcatcaccaacggcagctgcctggccagcaggaagaccagcttcatgatggccctgtgcctgagcagcatctatgaggacctgaagatgtaccaggtggagttcaagaccatgaatgccaagctgctgatggaccccaagaggcagatcttcctggaccagaacatgctggccgtgattgatgagctgatgcaggccctgaacttcaacagcgagaccgtgccccagaagagcagcctggaggagccagacttctacaagaccaagatcaagctgtgcatcctgctgcacgccttccgcatccgggctgtgaccatcgacagagtgatgagctacctgaatgccagctag

SEQ ID NO: 326 - DNA, 720 bp, Artificial Sequence
  Description of Artificial Sequence: Synthetic Transcript Sequence
atgtggcccccaggcagcgccagccagcccccacccagccctgctgctgccaccggcctgcaccctgctgcccggcctgtgtccctgcagtgccgcctgtccatgtgcccagcccggagcctgctgctggtggccaccctggtgctgctggaccacctgagcctggccaggaacctgcctgtggccaccccagaccccggcatgttcccctgcctgcaccacagccagaacctgctgcgggctgtgagcaacatgctgcagaaggcccggcagaccctggagttctacccctgcaccagcgaggagattgaccacgaggacatcaccaaggacaagaccagcacagtggaggcctgcctgcccctggagctgaccaagaatggcagctgcctggccagcaggaagaccagcttcatgatggccctgtgcctgagcagcatctatgaggacctgaagatgtaccaggtggagttcaagaccatgaatgccaagctgctgatggaccccaagaggcagatcttcctggaccagaacatgctggccgtgattgatgagctgatgcaggccctgaacttcaacagcgagaccgtgccccagaagagcagcctggaggagccagacttctacaagaccaagatcaagctgtgcatcctgctgcacgccttccgcatccgggctgtgaccatcgacagagtgatgagctacctgaatgccagctag

SEQ ID NO: 327 - DNA, 648 bp, Artificial Sequence
  Description of Artificial Sequence: Synthetic Transcript Sequence
atgtggcccccaggcagcgccagccagcccccacccagccctgctgctgccaccggcctgcaccctgctgcccggcctgtgtccctgcagtgccgcctgtccatgtgcccagcccggagcctgctgctggtggccaccctggtgctgctggaccacctgagcctggccaggaacctgcctgtggccaccccagaccccggcatgttcccctgcctgcaccacagccagaacctgctgcgggctgtgagcaacatgctgcagaagaatgaaagctgcctgaacagccgggagaccagcttcatcaccaacggcagctgcctggccagcaggaagaccagcttcatgatggccctgtgcctgagcagcatctatgaggacctgaagatgtaccaggtggagttcaagaccatgaatgccaagctgctgatggaccccaagaggcagatcttcctggaccagaacatgctggccgtgattgatgagctgatgcaggccctgaacttcaacagcgagaccgtgccccagaagagcagcctggaggagccagacttctacaagaccaagatcaagctgtgcatcctgctgcacgccttccgcatccgggctgtgaccatcgacagagtgatgagctacctgaatgccagctag

SEQ ID NO: 328 - DNA, 429 bp, Artificial Sequence
  Description of Artificial Sequence: Synthetic Transcript Sequence
atgagcctgctgcctgtgccctacacagaagctgccagcctgagcacaggcagcacagtgaccatcaagggccggcccctggcctgcttcctgaatgagccctacctgcaggtggacttccacacagagatgaaggaggagagtgacatcgtgttccacttccaggtgtgcttcggccggcgggtggtgatgaacagccgggagtatggagcctggaagcagcaggtggagagcaagaacatgcccttccaggacggccaggagtttgagctgagcatctctgtgctgcctgacaagtaccaggtgatggtgaatggccagagcagctacacctttgaccaccgcatcaagccagaggccgtgaagatggtgcaggtgtggagggacatcagcctgaccaagttcaacgtgtcctacctgaagaggtag

SEQ ID NO: 329 - DNA, 657 bp, Artificial Sequence
  Description of Artificial Sequence: Synthetic Transcript Sequence
atgagctttgtgggggagaacagcggcgtgaagatgggcagcgaggactgggagaaggatgagccccagtgctgcctggaggaccctgctggcagccccctggagcccggccccagcctgcccaccatgaactttgtgcacaccagccccaaggtgaagaacctgaaccccaagaagttcagcatccatgaccaggaccacaaggtgctggtgctggacagcggcaacctgattgctgtgcctgacaagaactacatccggcctgagatcttctttgccctggccagcagcctgagcagcgccagcgctgagaagggcagccccatcctgctgggcgtgtccaaaggagagttctgcctgtactgtgacaaggacaagggccagagccaccccagcctgcagctgaagaaggagaagctgatgaagctggccgcccagaaggagagcgcccggcggcccttcatcttctaccgggcccaggtgggctcctggaacatgctggagagcgctgcccaccctggctggttcatctgcaccagctgcaactgcaatgaacctgtgggcgtgacagacaagtttgagaacaggaagcacatcgagttctccttccagcctgtgtgcaaggccgagatgagccccagcgaggtgtctgactag

SEQ ID NO: 330 - DNA, 579 bp, Artificial Sequence
  Description of Artificial Sequence: Synthetic Transcript Sequence
atgagcggctgtgaccggcgggagacagagaccaagggcaagaacagcttcaagaagaggctgcggggccccaaggtgaagaacctgaaccccaagaagttcagcatccatgaccaggaccacaaggtgctggtgctggacagcggcaacctgattgctgtgcctgacaagaactacatccggcctgagatcttctttgccctggccagcagcctgagcagcgccagcgctgagaagggcagccccatcctgctgggcgtgtccaaaggagagttctgcctgtactgtgacaaggacaagggccagagccaccccagcctgcagctgaagaaggagaagctgatgaagctggccgcccagaaggagagcgcccggcggcccttcatcttctaccgggcccaggtgggctcctggaacatgctggagagcgctgcccaccctggctggttcatctgcaccagctgcaactgcaatgaacctgtgggcgtgacagacaagtttgagaacaggaagcacatcgagttctccttccagcctgtgtgcaaggccgagatgagccccagcgaggtgtctgactag

SEQ ID NO: 331 - DNA, 474 bp, Artificial Sequence
  Description of Artificial Sequence: Synthetic Transcript Sequence
atgagctttgtgggggagaacagcggcgtgaagatgggcagcgaggactgggagaaggatgagccccagtgctgcctggaggagatcttctttgccctggccagcagcctgagcagcgccagcgctgagaagggcagccccatcctgctgggcgtgtccaagggggagttctgcctgtactgtgacaaggacaagggccagagccaccccagcctgcagctgaagaaggagaagctgatgaagctggccgcccagaaggagagcgcccggcggcccttcatcttctaccgggcccaggtgggctcctggaacatgctggagagcgctgcccaccctggctggttcatctgcaccagctgcaactgcaatgaacctgtgggcgtgacagacaagtttgaaaataggaagcacatcgagttctccttccagcctgtgtgcaaggccgagatgagccccagcgaggtgtctgactag

SEQ ID NO: 332 - DNA, 594 bp, Artificial Sequence
  Description of Artificial Sequence: Synthetic Transcript Sequence
atgagctttgtgggggagaacagcggcgtgaagatgggcagcgaggactgggagaaggatgagccccagtgctgcctggagggccccaaggtgaagaacctgaaccccaagaagttcagcatccatgaccaggaccacaaggtgctggtgctggacagcggcaacctgattgctgtgcctgacaagaactacatccggcctgagatcttctttgccctggccagcagcctgagcagcgccagcgctgagaagggcagccccatcctgctgggcgtgtccaagggggagttctgcctgtactgtgacaaggacaagggccagagccaccccagcctgcagctgaagaaggagaagctgatgaagctggccgcccagaaggagagcgcccggcggcccttcatcttctaccgggcccaggtgggctcctggaacatgctggagagcgctgcccaccctggctggttcatctgcaccagctgcaactgcaatgaacctgtgggcgtgacagacaagtttgaaaataggaagcacatcgagttctccttccagcctgtgtgcaaggccgagatgagccccagcgaggtgtctgactag

SEQ ID NO: 333 - DNA, 537 bp, Artificial Sequence
  Description of Artificial Sequence: Synthetic Transcript Sequence
atgagctttgtgggggagaacagcggcgtgaagatgggcagcgaggactgggagaaggatgagccccagtgctgcctggaggaccctgctggcagccccctggagcccggccccagcctgcccaccatgaactttgtgcacaccaagatcttctttgccctggccagcagcctgagcagcgccagcgctgagaagggcagccccatcctgctgggcgtgtccaaaggagagttctgcctgtactgtgacaaggacaagggccagagccaccccagcctgcagctgaagaaggagaagctgatgaagctggccgcccagaaggagagcgcccggcggcccttcatcttctaccgggcccaggtgggctcctggaacatgctggagagcgctgcccaccctggctggttcatctgcaccagctgcaactgcaatgaacctgtgggcgtgacagacaagtttgagaacaggaagcacatcgagttctccttccagcctgtgtgcaaggccgagatgagccccagcgaggtgtctgactag

SEQ ID NO: 334 - DNA, 1344 bp, Artificial Sequence
  Description of Artificial Sequence: Synthetic Transcript Sequence
atgatccccaccttcaccgccctgctgtgcctgggcctgagcctgggccccaggacccacatgcaggccggccccctgcccaagcccaccctgtgggccgagcccggcagcgtcatctcctggggcaacagcgtgaccatctggtgccagggcaccctggaggcccgggagtaccgcctggacaaggaggagagccctgccccctgggaccggcagaaccccctggagcccaagaacaaggcccgcttcagcatccccagcatgacagaggactatgccggccgctaccgctgctactaccgcagccctgtgggctggagccagcccagcgaccccctggagctggtgatgaccggggcctacagcaagcccaccctgagcgccctgcccagccccctggtgaccagcggcaagtctgtgaccctgctgtgccagagccgcagccccatggacaccttcctgctgatcaaggagcgggccgcccaccccctgctgcacctgcggagtgaacatggagcccagcagcaccaggccgagttccccatgagccctgtgacctctgtgcatggaggcacctaccgctgcttcagcagccacggcttcagccactacctgctgagccaccccagcgaccccctggagctgattgtgtctggcagcctggaggacccccggcccagccccaccaggtctgtgtccacagctgctggccctgaggaccagcccctgatgcccaccggctctgtgccccacagcggcctgcggcggcactgggaggtgctgattggagtgctggtggtgtccatcctgctgctgagcctgctgctcttcctgctgctgcagcactggaggcagggcaagcacaggaccctggcccagaggcaggccgacttccagaggcctcctggagctgctgagcctgagcccaaggatggcggcctgcagaggaggagcagccctgctgctgatgtgcagggcgagaacttctgtgccgctgtgaagaacacccagccagaagatggagtggagatggacaccaggagcccccatgatgaggacccccaggccgtgacctacgccaaggtgaagcacagccggccccggcgggagatggccagcccccccagccccctgtctggagagttcctggacaccaaggaccggcaggccgaggaggaccggcagatggacacagaggccgccgccagcgaggccccccaggatgtgacctacgcccagctgcacagcttcaccctgcggcagaaggccacagagcccccacccagccaggagggcgccagccctgctgagcccagcgtgtatgccaccctggccatccactag

SEQ ID NO: 335 - DNA, 636 bp, Artificial Sequence
  Description of Artificial Sequence: Synthetic Transcript Sequence
atggtggcccacaaccaggtggccgctgacaatgctgtgtccacagctgctgagcccaggagaagacctgagcccagcagcagcagcagcagcagccctgctgccccagcccggccccggccctgcccagctgtgcctgccccagcccctggggacacccacttccgcaccttccgcagccacgccgactaccgccgcatcacccgggccagcgccctgctggatgcctgtggcttctactggggccccctgtctgtgcatggagcccacgagcggctgcgggcagagcctgtgggcaccttcctggtgcgggacagccggcagaggaactgcttctttgccctgtctgtgaagatggccagcggccccaccagcatccgggtgcacttccaggccggccgcttccacctggatggcagccgggagagctttgactgcctgtttgagctgctggagcactacgtggccgcccccaggaggatgctgggcgcccccctgcggcagaggagagtgcggcccctgcaggagctgtgccggcagagaattgtggccaccgtgggccgggagaacctggcccgcatccccctgaaccctgtgctgcgggactacctgagcagcttccccttccagatctag

SEQ ID NO: 336 - DNA, 1596 bp, Artificial Sequence
  Description of Artificial Sequence: Synthetic Transcript Sequence
atggccgccaccctggacctgaagagcaaggaggagaaggatgctgagctggacaagagaattgaggccctgcggaggaagaatgaggccctgatccgccgctaccaggagattgaggaggacaggaagaaggccgagctggagggcgtggccgtgacagcccccaggaagggccgctctgtggagaaggaaaatgtggccgtggagagcgagaagaacctgggccccagccgccgcagccctggcaccccccggcccccaggggccagcaaaggaggccgcaccccaccccagcagggcggccgggccggcatgggccgggccagccgctcctgggagggcagccctggagagcagccccggggcggcggggccggcggccggggccggcggggccggggccggggcagcccccacctgtctggagctggggacaccagcatcagtgacaggaagagcaaggagtgggaggagcggcggcggcagaacatcgagaagatgaatgaggagatggagaagattgctgaatatgaaagaaaccagcgggagggcgtgctggagcccaaccctgtgaggaacttcctggatgacccccggcggcgcagcggccccctggaggagagcgagcgggaccggcgggaggagagcagaagacatggaagaaactggggcggccctgactttgagcgggtgcgctgtggcctggagcacgagcggcagggccggcgggccggcctgggcagcgctggggacatgaccctgtccatgacaggccgggagaggtctgagtacctgcgctggaagcaggagcgggagaagattgaccaggagcggctgcagaggcacaggaagcccaccggccagtggaggcgggagtgggatgctgagaagacagatggcatgttcaaggatggccctgtgcctgcccacgagcccagccacagatatgatgaccaggcctgggcccggccccccaagccacccaccttcggggagttcctgagccagcacaaggccgaggccagcagcagaagaagaaggaagagcagccggccccaggccaaggccgccccccgggcctacagcgaccatgatgaccgctgggagaccaaggagggcgccgccagccctgcccctgagaccccccagcccaccagccctgagaccagccccaaggagacccccatgcagcccccagagatcccagccccagcccaccggcccccagaagatgaaggagaagaaaatgaaggagaggaggatgaggagtgggaggacatcagtgaagatgaggaggaggaggagattgaggtggaggagggagatgaggaggagcccgcccaggaccaccaggcccctgaggccgcccccaccggcatcccctgcagcgagcaggcccatggagtgcccttcagccctgaggagcccctgctggagccccaggcccctggcacccccagcagccccttcagcccccccagcggccaccagcctgtgtctgactggggcgaggaggtggagctgaacagccccaggaccacccacctggccggggccctgagccctggagaggcctggccctttgagagcgtgtag

SEQ ID NO: 337 - DNA, 531 bp, Artificial Sequence
  Description of Artificial Sequence: Synthetic Transcript Sequence
atgcggatcttcgccgtgttcatcttcatgacctactggcacctgttaaacgctccctacaataagattaaccaaagaattctggtggttgacccggtgactagcgaacacgagctgacctgccaagctgaaggctatcccaaggcggaagtgatttggacaagcagtgaccaccaggtactctccggaaaaaccacgacaacaaatagcaagcgtgaggagaaactgtttaacgttacatctaccttgcgcatcaacaccacaactaatgagatattttactgcacatttcgcagactggacccagaagaaaatcacaccgcggaattagttatccccgagctgcctctggctcatccccccaacgagcgcacccatcttgtgatccttggtgccattcttctctgcctgggggtggccttaacttttatcttcaggttacgaaaaggacggatgatggacgtcaagaaatgcggtattcaagacacaaattccaagaaacagtccgacactcacttggaagagacctag

SEQ ID NO: 338 - DNA, 873 bp, Artificial Sequence
  Description of Artificial Sequence: Synthetic Transcript Sequence
atgcggatcttcgccgtgttcatcttcatgacctactggcacctgctgaacgccttcactgtgactgtgcccaaggacctctacgtggtggagtatggttctaatatgactattgagtgcaagttcccagtcgagaaacaactcgatctcgccgccctcattgtgtattgggagatggaagacaagaacattattcagtttgtacacggagaagaggatctcaaggtgcagcacagcagctacagacaacgagcgagactgctgaaagatcagttgtcccttgggaacgccgcgctccagatcacagatgtaaagctgcaggatgccggggtctaccggtgtatgatttcttacggcggtgctgactacaagcggattactgtcaaggttaacgctccatacaacaaaatcaaccaacgcatccttgtggtggatcccgtaactagcgagcacgaactgacctgtcaggctgagggatatccaaaagctgaggtaatctggaccagctcagaccatcaagtgttgtcaggaaagacaactacaactaacagtaaacgggaggagaaacttttcaatgtaacttcaaccctccggataaacactacaacaaacgagatcttctattgcacctttaggcgtctcgaccctgaggagaaccatacagctgagctggttatcccggaattgccactagcccatccaccaaatgaaaggacccacctggtgatcttaggtgctattctgttgtgtctcggcgtagctctgacattcattttcagactgagaaaaggaagaatgatggacgtgaagaaatgtggcattcaggacactaattctaagaagcagagcgacactcatttggaagaaacatag

SEQ ID NO: 339 - DNA, 612 bp, Artificial Sequence
  Description of Artificial Sequence: Synthetic Transcript Sequence
atggtgcggctgcccctgcagtgcgtgctgtggggctgcctgctgacagccgtgcacccagagcccccaaccgcctgtagagagaagcaatatttaatcaacagccagtgttgttcattgtgtcaacctggacagaagctggtgtcggactgcaccgaattcacagagacagagtgcttgccttgcggcgagtctgaattcctggatacttggaaccgggagactcactgccaccaacacaagtactgcgaccccaacttgggactgagagttcagcagaaagggacctctgagacggacactatctgcacatgcgaggagggctggcactgtacttccgaggcgtgcgaatcctgcgtcctgcaccgcagctgtagtccaggattcggtgtgaaacagattgccacaggggtcagcgacacgatctgtgagccatgccccgtcggatttttttcgaacgtatcatcagcttttgaaaagtgccatccctggactagaagccctggaagcgccgaatctcccggcggagacccgcaccacctcagggatccagtatgccatccccttggcgccgggctatatcagaagggaggccaggaagcgaaccagtag

SEQ ID NO: 340 - DNA, 786 bp, Artificial Sequence
  Description of Artificial Sequence: Synthetic Transcript Sequence
ggccggagccccctgcggacccgggaccgggtgctgaccaactgggaagacgggcttactgtcgcttatggcgccgtgaagctcattcagtctctgtcactgcaacctgttggctggcaacaaaattggggcctctcttcgcccccaaccatgcttctcccaagcagggctcagtcccccacagaattaccccttgcccctcttgcagaacctaacacaggctgctcttccctcctgagctggcactccaccaggggggaacttcacctgtgggcgttggggttgggccagatgggcggtagcaaatgcgggtctccgctctctcctctggcacctactttggaagcactcagacggccgtggtgtggccagcagggagcaggcggcacacgaggtatctctacagaccccccaagcggaaaaggggggcgcgcgtggggccgcgaccccctccctagggaaggcttattgagaggtaccgcggcccccgcggctggcggggaccttactccctgcctgtctagaccgccaacaccttccaggaatccaaggcggtccatcttccctaccatcttcctggcccctacattactgttgcaatgtcggagattatatatggatgccaatagaagcccgaggcgtatggccaaaagagtggcaagccagtgccgcagagatagcgaggcagcccctacccaggaatgtggccacgtcgggaagcaggccgtagggcagcgcgcctggtgctgttgctgctgcggagttcgtgtgaggggatggcattag

SEQ ID NO: 341 - DNA, 834 bp, Artificial Sequence
  Description of Artificial Sequence: Synthetic Transcript Sequence
atggtgcggctgcccctgcagtgcgtgctgtggggctgcctgctgacggccgtgcatcctgagccccctacagcatgtcgcgagaagcagtatctcatcaattcacagtgctgctccctgtgccagcccggccagaagcttgtgtccgattgtacggaattcaccgagaccgaatgtcttccctgtggtgagagcgagttcttagacacatggaatcgggagacccactgccatcagcataaatactgtgacccaaatctgggtcttcgcgtgcaacagaaaggcacgtcagagaccgataccatctgcacatgtgaggaaggttggcattgcacttccgaggcatgcgaatcgtgtgtcctgcatcgatcttgtagtccaggattcggggtaaagcagatcgctacaggagtttcagacaccatttgcgaaccctgccccgtgggatttttctcgaacgtctcctcagctttcgagaagtgccatccctggacttcttgcgaaacgaaagatctggttgttcaacaggccggcaccaataagaccgacgtcgtctgtggacctcaggataggctgcgggctcttgtcgtgatccccattatcttcggaatactcttcgccatcctgctggtgttagttttcatcaagaaagtagctaaaaagcctacaaacaaagccccccatcccaaacaggaaccacaggagatcaattttcctgatgatctgccaggatccaatacagccgcacctgtccaggaaacgctgcacggttgccagcctgtcacccaagaggatggcaaggagtctaggataagtgttcaagagagacaatag

SEQ ID NO: 342 - DNA, 723 bp, Artificial Sequence
  Description of Artificial Sequence: Synthetic Transcript Sequence
atgatcgagacctacaaccagaccagcccccggagcgccgccaccggtttgccaatctctatgaaaatcttcatgtacctcttgacagtctttctcatcactcaaatgattggatccgcgctgtttgcagtgtatttgcatcgccgtctcgacaagatagaggacgaaagaaacctgcatgaagatttcgtcttcatgaaaactatccagcgctgcaacaccggagagcggtccctctcacttctgaactgcgaggaaatcaaaagtcagtttgaagggtttgtgaaggatatcatgttgaacaaagaagagacaaagaaggagaatagttttgagatgcaaaaagttcttcaatgggctgaaaagggctattatactatgagtaacaacctcgtcactctcgagaatggcaaacagctgacggttaaacgtcaaggactctactacatttatgcgcaggtcactttctgctccaatcgcgaagcgtcgtcacaggccccttttatcgctagcctgtgtctgaagtccccggggcgttttgagagaattctactgcgcgccgcaaacactcactctagcgccaaaccttgcggacagcagtcaatccacttagggggcgtgttcgaattgcaaccaggtgcaagtgtttttgtgaacgtgacagacccgtcacaggtgtcccatgggaccggattcacgtcctttgggctgctgaagctgtag

SEQ ID NO: 343 - DNA, 786 bp, Artificial Sequence
  Description of Artificial Sequence: Synthetic Transcript Sequence
atgatcgagacctacaaccagaccagcccccggagcgccgccaccggtttgcctatctctatgaagatcttcatgtaccttctcactgtttttctgattacccagatgatcggttctgccctgttcgcagtgtacttgcaccgtcgtctggataaaatcgaagacgagcggaatctccatgaggatttcgtgtttatgaagacaatacagcgctgcaacaccggcgaaagaagtctcagcttgctcaactgcgaagagatcaaaagccagtttgaggggttcgtgaaagacatcatgctcaataaggaggagacaaaaaaggagaactcattcgaaatgcaaaagggagatcagaacccacagatcgcggcacatgtgatttctgaagcctccagtaagactacctcagtgttgcagtgggccgagaaaggatactatacaatgagcaacaatctggtcaccctggagaacggaaaacaattgacagttaagagacagggcctgtactacatttatgcccaggtgacgttctgctccaatcgtgaagctagcagccaggccccgtttatcgcttctctatgcctgaaaagtcctggaaggtttgagcgaattctgctcagagcagcgaatacccacagcagtgccaaaccctgtgggcagcagtctattcaccttggcggcgtgttcgagctgcagccgggcgcatccgtgttcgtgaatgtaacagacccgagtcaagtgagtcacggcaccggttttaccagttttgggcttttgaaattgtag

SEQ ID NO: 344 - DNA, 5169 bp, Artificial Sequence
  Description of Artificial Sequence: Synthetic Transcript Sequence
atgcggaccggctgggccaccccccggcggcccgccggcctgctgatgcttttgttttggttcttcgacctggccgagcccagtggccgggctgctaacgacccttttaccatagtccacggcaatacaggcaagtgcatcaaacctgtatatgggtggatcgtcgccgacgattgtgatgagaccgaggataagctctggaagtgggtctctcaacacagactcttccacctccactctcagaagtgtctcgggcttgatattactaaaagcgtcaacgaattacgtatgttttcttgcgattcatcggctatgctttggtggaaatgcgaacaccactctctttacggtgcagccaggtacaggctggctctgaaggacgggcacggtaccgccatcagcaacgcgagtgacgtgtggaagaaagggggtagcgaagaaagcctttgtgatcaaccataccacgagatttacacgcgggacggcaatagctatggccgtccctgcgaattcccttttctgatagatggaacatggcaccacgactgcatcctggacgaagatcatagcggcccatggtgcgccaccaccctgaattatgagtacgacagaaaatgggggatttgcctgaagcctgaaaacgggtgcgaggacaattgggaaaaaaacgaacagttcggtagctgttaccagttcaacacgcagaccgccctcagctggaaggaggcttacgtttcttgtcaaaaccagggagccgatctcttgagcatcaattccgctgcagagctgacatatcttaaggagaaagagggtatagcaaaaatattttggattgggcttaatcagctttacagtgcccgcggctgggaatggtccgatcataagccgctgaattttctgaattgggaccctgataggccatctgccccaaccattggaggaagttcatgtgcaaggatggacgctgagtccggactctggcagtctttctcgtgtgaggcccagcttccatatgtgtgtagaaagcctctaaacaatacggtcgagctgacagatgtgtggacctatagcgatactagatgcgatgctgggtggctccctaataatggattctgctatctactcgtaaatgaaagcaactcgtgggacaaagcgcacgcgaagtgtaaggctttctcctccgacctgattagcattcattctctggccgacgtggaggtcgtggtgaccaaactacacaacgaagacatcaaggaagaggtgtggataggcctcaagaacattaacatacccactttgtttcaatggtccgacggcacagaagtgactttgacatactgggatgagaacgagcccaacgtcccttacaacaagactccaaactgtgtcagctatctcggtgaacttggccaatggaaagtgcagtcatgcgaggagaagttgaaatatgtttgcaagaggaagggggagaaactgaacgatgcctcctctgataaaatgtgtccccccgacgagggctggaaacgccatggagagacatgttataaaatctatgaggacgaagtccctttcggaactaattgtaatcttactatcacttccagattcgagcaggagtatctcaacgacctgatgaagaaatatgacaaaagtctgcgcaagtatttttggacgggcctgagagacgtggactcttgcggggaatacaattgggcaaccgtgggcggacggagaagggctgtgacgttttccaactggaattttctggaacctgcatctcccgggggttgcgtagctatgtctactggaaagagtgttggaaaatgggaggtcaaggactgccgctctttcaaagcactgagcatctgtaaaaagatgagcggtccgctgggtcccgaggaggcctctcctaaacctgatgacccctgccctgaagggtggcagtcatttcccgctagtctgagttgttataaggtgtttcatgcagaacgcatcgtgcgaaaacggaattgggaggaagctgagagattttgtcaggccttgggggcgcacctaagctccttcagccacgttgatgagattaaagaattcttacatttcctgactgatcagttcagtgggcagcattggctctggatcggattgaataagcgctcccccgacttacagggcagttggcagtggagcgataggacaccagtatcaacaatcatcatgcctaacgagtttcagcaagattacgatatccgcgactgtgccgccgtgaaagtatttcacagaccttggcgaagagggtggcacttctatgacgatcgagagttcatttatttgcgcccatttgcctgtgacacaaaacttgaatgggtatgccagatccccaagggaagaactcccaaaacacctgactggtataatcctgatcgggccgggattcatggtcctcccctgatcatagaaggctcagagtattggttcgttgccgacttgcatctgaattatgaagaagctgtactgtactgtgcctctaaccatagctttttggctaccatcaccagctttgtgggccttaaagccatcaagaacaagatagccaacatctcgggcgacggccaaaaatggtggattcggataagtgagtggccaatagatgaccatttcacctactcccgatacccttggcaccgcttccctgtcaccttcggggaggagtgtctctacatgagtgctaaaacgtggctcatcgaccttggaaaaccaacagattgctctaccaagcttccattcatatgcgaaaaatacaacgtgagcagccttgagaagtatagtccagattctgccgccaaggtgcaatgcagcgaacaatggattccattccaaaataaatgctttttaaagattaagcccgtgtccctcacattctcacaggccagcgacacatgccattcttacggcggaacccttccctcggtcctgagccagatcgaacaagattttatcacaagcttgctgcccgatatggaagccaccctctggattggattacgttggaccgcatacgaaaaaattaataagtggacagataaccgagagctgacatactcaaatttccacccacttttggtgtcaggccgtctgcgaatacccgaaaacttcttcgaagaggagtctaggtatcactgtgccctcatactgaacttgcagaaatcaccgtttacgggtacctggaattttacttcctgttccgagagacacttcgttagcttgtgccaaaagtactctgaagtcaagagcagacagactctgcagaacgccagcgaaactgtcaagtacctcaacaacctttacaaaatcattcccaaaacccttacctggcacagcgccaagcgggaatgcctgaaaagcaacatgcagctggtctccatcacggatccctaccagcaggcattcctttccgtacaggctctgcttcacaacagcagcctgtggatcgggctgtttagccaggacgacgaactgaactttggctggagcgatggcaagcgactgcacttctctaggtgggccgaaaccaacgggcagctcgaagattgcgttgtcctggatactgatggattctggaaaacagtcgactgcaatgacaaccagccaggagcaatttgttattattcagggaacgagactgaaaaggaagtgaaacctgtggattctgtgaaatgtccttcccctgtcctgaatactccgtggatcccgtttcagaactgttgttacaactttataattacgaaaaatcgccatatggccaccacccaggacgaagtgcacaccaaatgtcagaaactgaaccccaagagccatatcctctctatccgtgacgaaaaggaaaacaattttgtgctcgagcagctactatacttcaactatatggccagttgggttatgcttggcattacttacaggaataagtccttaatgtggtttgataaaacccccttgagctatactcactggagggcgggccgtccaaccatcaagaacgagaaattccttgccggactgtccaccgacggattctgggatatccagactttcaaagtgatagaggaggctgtgtattttcaccagcacagcattcttgcctgcaagatcgaaatggttgattataaagaggaatacaacaccacattacctcagtttatgccctacgaagacggcatttattccgtgatacagaagaaggtgacgtggtacgaggctctgaatatgtgcagtcagtcaggcggccacctcgccagcgtgcacaaccagaacgggcagctgttcctggaagacatcgtcaaacgcgacggctttcccttgtgggtagggctatcatcccacgacggctcggagtcctctttcgagtggtcagacggaagcaccttcgactacattccatggaaaggccaaacctctcccggcaattgcgtgctcctggatccgaaaggaacttggaagcatgagaagtgtaactctgtgaaagatggcgcaatatgctataagccaacaaagagcaagaagctgtctcggttgacctactctagtagatgtcccgcggccaaagagaacggaagccggtggatacaatacaaagggcactgctataaatcagaccaagcactccactccttcagtgaagccaaaaaactgtgcagcaaacatgatcattctgcgacgattgtttctattaaagacgaggacgagaataagttcgtctcgcggctaatgcgggaaaataataatatcacaatgcgcgtctggctgggcctgtcacagcattccgtagaccagagctggagctggctggacggatccgaggtcacttttgtgaagtgggaaaataaatcaaaatccggagttggtcggtgtagcatgctgatagcttctaatgaaacatggaaaaaggttgagtgcgaacacggttttggaagggtagtatgtaaggtgcctctcggtcccgactacactgccatcgccattatcgttgcaactctctcaattttggtgctgatgggcggcctgatctggtttctttttcagcgccacagactgcacttggctgggttcagcagtgtgaggtacgctcagggggtcaacgaggacgaaattatgctcccatcattccacgactag

SEQ ID NO: 345 - DNA, 5454 bp, Artificial Sequence
  Description of Artificial Sequence: Synthetic Transcript Sequence
atgcggaccggctgggccaccccccggcggcccgccggcctgctgatgctgctgttttggttctttgatcttgccgagccttccggccgcgcagccaacgacccatttactatagtgcacggaaataccggtaaatgtataaagccagtttacggttggatcgtggccgacgactgcgatgaaacagaggacaaattatggaagtgggtttctcagcatagactgttccacctgcactcccaaaaatgcctgggcctcgatatcactaagtctgtgaatgaactgcgaatgttcagctgcgactcaagtgcgatgctctggtggaaatgtgagcaccatagtttgtacggcgcagctaggtaccgactcgcccttaaggatgggcacgggactgcgatctcaaacgcaagtgacgtgtggaagaagggggggtccgaagagtctctctgcgaccagccctaccatgagatctacacccgtgatggcaacagttacgggcggccctgtgagttcccattcctgatcgatggcacatggcaccacgactgtattttggacgaagaccactccggcccctggtgcgctactacgctaaattacgagtacgatagaaaatggggtatctgcctgaagccagaaaatgggtgcgaagataactgggagaaaaacgaacagttcgggagctgctaccagtttaatacacagaccgcgttatcgtggaaggaggcttatgtcagttgtcaaaatcagggtgctgacttgctgtccatcaattctgccgccgaactgacctatttgaaggaaaaggagggaatagctaagatcttctggataggtctcaaccagctctattctgccaggggatgggagtggtctgaccacaagcccttaaattttctgaactgggaccccgaccgacctagcgcgccaactataggtggcagcagttgtgccaggatggacgctgaaagcgggctctggcaatcattcagttgcgaagcacagctgccgtacgtgtgtagaaagcccctcaataacaccgtcgaactcactgatgtgtggacgtactcagacactcgctgcgatgccggctggctacccaacaatggattttgctacctgcttgtgaacgaatctaacagctgggacaaagctcacgctaaatgcaaggcattttcctcagacctgatcagcatacactcccttgcggatgtggaggtggtggttactaaattgcacaatgaggacattaaggaggaggtttggatcggccttaagaacataaatatccccacgctgtttcagtggagtgatggtaccgaggtcacgctgacatactgggatgagaatgaacccaatgtcccttacaacaaaacccccaattgcgtctcgtacctcggtgaattgggccagtggaaagttcagtcttgcgaggagaagctcaagtacgtgtgtaagcgcaagggggaaaagctcaacgatgcctcctccgacaagatgtgccctccagatgagggctggaagagacatggcgagacttgctacaagatttatgaggacgaggtgcccttcggcactaactgtaaccttacaattacctcaagattcgagcaagaatacttgaacgaccttatgaaaaagtatgataagtccctccgcaaatacttttggacaggccttcgtgatgtcgactcttgcggggagtacaactgggcaactgtaggtgggaggcggcgtgctgtgacattttctaattggaattttctggaacccgctagtcctgggggctgtgtcgccatgagcacgggtaaaagcgtagggaaatgggaagtgaaggattgccggagctttaaggctctttccatctgcaaaaagatgtccggaccattaggcccagaggaggcaagtccaaagccggatgacccttgccctgagggatggcagagtttccctgcaagtctttcctgttacaaagtgttccacgccgaaaggattgtacggaagaggaattgggaagaggccgaacgcttctgccaagctttaggagcccatctcagcagtttttcccacgtagacgaaattaaggagttcctgcattttttgacggaccagtttagtggacagcactggctctggattggattgaataaaagaagccctgatctgcagggcagctggcagtggagcgaccgcactcctgtcagcacgatcatcatgcctaacgagttccagcaggactatgacatccgagactgtgccgcggtgaaagtgtttcaccgaccatggaggaggggatggcacttctacgacgaccgcgaattcatttatctcagacctttcgcctgtgacactaaacttgagtgggtctgtcagatcccaaagggaaggactccaaagaccccagattggtacaatcctgatagggcgggcatccatggtccacccttgatcattgaaggtagcgagtactggttcgtggcagatctccacctgaattacgaggaagctgtcctttactgtgctagcaaccacagtttcctcgccaccatcaccagttttgtcggcctaaaggctatcaagaataaaatcgctaacatctccggggatgggcagaaatggtggattcgcatctctgagtggccgatcgacgaccactttacatactctcggtacccctggcaccggttccctgttacatttggagaggagtgtctctatatgtctgccaaaacctggcttatcgatctcggtaagcccacagattgctcgactaaacttccattcatatgtgagaaatataacgtgtcatcccttgaaaaatattcccctgactctgccgctaaggtgcagtgtagcgagcagtggatacccttccagaacaagtgctttttaaaaataaagcctgtcagcctgactttttcccaagcgtcagatacatgccacagttacggcggcaccctgcccagcgtcctgtcacagattgagcaggatttcatcacgagtctgctcccggatatggaggcaacactatggatcgggttgcgctggacagcctatgagaagatcaataagtggaccgacaatagagagctcacttattctaacttccacccattgctggtttcaggtcggctgcgcatacccgagaactttttcgaggaggaaagcaggtaccactgcgcactgatactgaacctgcagaagagccccttcacaggaacgtggaactttacttcatgctccgaaaggcacttcgtctcattgtgtcagaagtactccgaagttaaatcgcggcaaactctgcagaacgctagcgaaaccgtgaagtacttgaataacttgtacaaaatcattcctaagacccttacctggcattcagcaaaacgcgagtgtctgaaatccaatatgcagctcgtgagtattaccgacccctatcagcaggccttcctgagcgtgcaggccctccttcacaacagctcgctgtggattgggctcttttctcaggatgacgagctgaacttcggttggtccgacggcaagagattacacttcagtagatgggccgagacaaatggccagctggaagattgcgtagtcctggatacagacggtttttggaagaccgtggactgcaatgataatcagccaggcgccatctgctactactccggaaatgagaccgaaaaggaggttaaacctgtcgatagcgtcaagtgcccaagccccgtgctgaataccccttggatacccttccaaaactgttgttataattttatcatcacaaagaacaggcacatggcaaccacacaggacgaagtacataccaaatgtcaaaaacttaaccccaaaagccatatactctccatccgggacgaaaaagaaaacaattttgtgctggaacagctgctttattttaattacatggccagttgggtgatgcttgggattacatacaggaacaagagcctcatgtggtttgataagacccctctgagctatacacactggagggccggacggcccactattaaaaacgagaagttcctggctggactctcaactgacggattctgggatatccagacttttaaggttatcgaggaggccgtctacttccaccagcatagtatcctggcctgtaagattgagatggtagattataaagaagagtacaacactactctgccgcagtttatgccttatgaggacggcatctattcagtcatccaaaagaaagtcacttggtacgaagccctgaatatgtgctcgcagagtggaggccatctcgcatcagtgcataatcagaatggccagctgtttctcgaggacatagtcaagcgcgacggatttcctctctgggtaggattgtctagtcatgatggctccgagtctagctttgagtggtccgacggctcaaccttcgactatatcccctggaagggtcagacatcacccggaaattgcgttctgctggatccgaagggaacctggaagcatgaaaagtgtaactccgtgaaggatggggccatttgttacaagcctactaaatctaagaagctgtccaggttgacatacagcagtcggtgccccgcagctaaagaaaatggatcaaggtggatacagtataaggggcattgttataagagtgatcaggctctgcacagcttcagcgaggctaagaagctgtgcagtaaacacgatcatagcgccactattgtatccattaaagatgaggacgagaataagtttgtcagtaggttaatgcgggagaacaataatatcaccatgcgggtatggctgggactgagccagcactccgtggattgtccctcttctacctggatccaattccaagactcctgctatatatttctccaggaagcgataaaagtggaatctatcgaggacgttaggaatcagtgtacagaccacggtgccgacatgatatccattcacaacgaggaagagaacgcctttatactggacaccctgaagaagcagtggaaaggcccagatgacattcttctcggaatgttttacgatacagacgacgcaagcttcaagtggtttgataacagcaacatgacctttgacaagtggacagaccaggatgacgatgaggatttagtggatacatgtgccttcttgcacatcaagactggggagtggaaaaaagggaactgtgaagtttcatccgttgaggggaccctgtgcaagacagccataccctataagcggaagtatctgtctgacaaccatatcttgatttctgctctggtgattgccagcacggtaattctgacagtgttgggtgcgatcatatggttcttatataagaagcattcagattcacggtttaccactgtcttttctaccgccccccagagcccctacaacgaagactgcgtgctcgtcgtgggcgaagagaatgaatatccagtgcagttcgattag

SEQ ID NO: 346 - DNA, 5622 bp, Artificial Sequence
  Description of Artificial Sequence: Synthetic Transcript Sequence
atgcggaccggctgggccaccccccggcggcccgccggcctgctgatgctgctgttttggtttttcgacctggccgagccttcagggagggcagctaacgaccccttcacgatcgtgcacggtaatacgggcaagtgtattaagcctgtttacggctggattgtggctgatgattgtgacgagaccgaggataaactgtggaagtgggtgtcacagcacaggctgttccacttacactctcagaagtgtctgggccttgacataacaaaatccgtaaacgagctccggatgttcagctgcgattcttcagctatgctgtggtggaagtgcgagcaccactccctttatggtgccgctcgatacagactggccttgaaggacgggcacggcactgcaattagtaatgcatccgatgtgtggaagaaggggggaagcgaggaatccctttgtgaccagccatatcatgagatttatacgcgagacggtaatagctatggccgaccttgtgagtttccctttctgattgacggcacctggcatcacgactgcatcttggatgaggatcatagtggcccttggtgcgctacaactttgaactacgagtatgatcgaaagtgggggatctgtctgaagccagaaaacgggtgcgaggacaactgggaaaagaatgaacagtttggatcctgttatcagttcaatacacagacagctctgtcttggaaggaagcctacgtgagctgtcaaaatcagggggccgaccttctgtccatcaactctgcggcagagttgacctacttgaaggaaaaagaaggcattgctaagatcttttggatcggactgaaccaattgtatagtgctcgaggctgggaatggtccgaccacaaacccctcaacttcctgaactgggatcctgatagaccctctgctcccacaatcggaggtagcagttgcgccaggatggatgcggagtcaggactttggcagagcttctcctgtgaggctcagttgccttacgtgtgcaggaaacccctgaacaacacagtggaattgaccgacgtgtggacgtacagtgatacccggtgtgatgcgggttggcttccaaacaacggcttctgctacttgttggttaacgagtctaattcctgggacaaggcccatgccaaatgcaaggcattcagttctgacttaataagcatacactctttggccgacgtggaagtggtggtcacgaaactccataacgaagacataaaggaggaggtgtggattgggttaaagaatatcaacatccccactctgtttcaatggtctgatggaaccgaagtcaccctcacctactgggatgagaatgaacctaatgtgccgtacaataagacccccaactgtgttagctatttaggagaactcgggcaatggaaggtgcagagctgtgaagagaagctcaagtacgtgtgcaaacgaaaaggcgaaaaactaaatgatgcttctagcgacaagatgtgccctcctgacgagggctggaaacgtcatggggagacgtgctataagatctacgaggacgaggttcctttcgggacaaactgtaacctcacaattacctccagatttgaacaagaatacctgaatgatctcatgaaaaagtacgataagtccctgaggaaatacttttggacaggactccgagacgttgactcctgtggggagtacaactgggctacagtcgggggtagacgcagggccgtgactttcagtaactggaattttctcgaacccgcctccccagggggctgtgttgcgatgtcgacaggcaaatccgtgggaaagtgggaggttaaggattgtcgatcatttaaggcactgtcgatctgcaaaaaaatgtccggccctcttggaccagaggaggctagtccgaagccggacgatccttgccccgaggggtggcagagcttccctgcatcactgagttgctataaagtctttcacgctgagcgcatcgtgcgcaagagaaactgggaagaggcggagcggttttgtcaagcactgggcgcccatttatcaagtttttcccatgtagatgaaatcaaagaattcttgcattttctaacagaccagtttagcgggcagcactggctctggattggacttaataaaaggtcccccgacttgcaagggtcctggcagtggagtgacagaacccctgtttctaccatcataatgccaaacgagttccaacaagattatgacattcgggactgcgccgcagtcaaggtattccatagaccctggagaaggggatggcacttttatgacgatagagagtttatttatctgaggccattcgcctgtgatacgaagctagaatgggtttgccaaatccccaaaggaaggacccccaagacccccgactggtacaaccccgacagagcaggaatccacggaccaccccttataatcgaagggtctgagtattggtttgttgccgatctgcacttaaattacgaggaagcagttttgtactgcgccagcaaccattcttttctcgctaccatcacatctttcgtaggcctgaaagccatcaaaaacaagatcgctaatatatccggagacgggcaaaaatggtggatcagaatttcagaatggccaatcgacgatcacttcacttatagcaggtacccatggcatcgctttcctgtgaccttcggcgaagagtgtctgtacatgtcagctaaaacctggctgatcgacttgggtaagcccactgattgctccacaaaactgccatttatttgtgagaaatataatgtcagttcgctcgaaaagtactctcctgattccgccgccaaggtccagtgttccgagcaatggatccccttccaaaacaagtgctttttgaaaattaagccggtcagccttacatttagtcaagcttctgacacatgtcattcctatggtggcactctgccctccgtcctgtcacagattgaacaagactttatcacttccttgctgcccgacatggaagccacactttggattggcctccggtggacagcttacgaaaaaatcaataaatggaccgacaatagggaactgacttattcaaattttcatcctctcctagtttctggcaggctgcgtatacctgaaaacttttttgaagaagagagtcgctatcactgtgctcttatactgaatctgcagaagagcccctttaccggaacatggaactttacttcatgcagcgagcgtcacttcgtgtccctatgtcagaaatactcagaggtcaaatccaggcaaacacttcagaacgccagcgagaccgtgaagtacctgaacaatctatacaagatcattccaaagacattgacttggcattccgccaagagagagtgcctgaaatctaatatgcagttagtctccatcaccgatccctaccaacaggcgttcctgtctgttcaggcgctgttacacaactcctctctttggatcggccttttctcacaggatgacgagctgaactttggctggagtgatggcaaacggctccactttagtcgctgggctgagacaaatggccaacttgaggactgtgtcgtactcgacaccgacggcttctggaagacagtggactgtaatgacaatcaacctggagccatatgttactacagtggtaatgagaccgagaaggaggtgaagccagtggacagtgtcaagtgcccgagcccagttctcaatacaccctggatcccatttcagaattgctgttataacttcatcatcaccaaaaacaggcatatggcgacaacccaggatgaagttcacaccaagtgccagaagctgaatcccaagagtcacatcctatcaattagagacgagaaggagaacaactttgtccttgagcagctgctgtactttaactatatggccagctgggtgatgctgggcataacataccgtaacaagtctctaatgtggtttgacaaaactccattgtcttacactcactggcgcgctggccgccctacaattaaaaacgagaaatttctggcgggcctatctactgacggtttttgggacatacagaccttcaaggtcatcgaggaagctgtgtacttccaccaacactcaatactcgcatgtaagatcgaaatggtagattacaaagaggagtacaacaccacattgcctcaattcatgccctatgaggacggcatttacagcgtcatccagaagaaagtgacgtggtacgaagccttgaacatgtgctctcaatctggtggacacttagccagcgtgcacaatcagaacggtcaactgttcctggaagacattgtgaagcgagatggatttcctttgtgggtcggtttgagctcacatgacgggagtgaatcatcctttgagtggtccgatggctcgacgttcgattacataccttggaagggacagacctcccctgggaattgcgttctgcttgacccaaaaggtacatggaaacacgagaaatgcaacagcgtgaaagatggtgcaatctgttacaaacctaccaaatcgaagaagctctctcgtttaacctactctagccgatgcccggctgctaaggagaacggtagcaggtggatccagtacaagggccattgttacaagtcagaccaggccctgcacagtttcagtgaggctaaaaaactctgtagcaaacacgatcatagcgcaactatagtgtctatcaaggacgaggacgagaacaagttcgtgtctcgcctgatgcgcgagaacaacaacattactatgagagtgtggctcggcctgagtcagcatagcgtcgatcagtcctggagctggctggacggctccgaagtaacatttgtgaaatgggagaataagagtaagtctggcgtgggtcgttgtagcatgctgatcgcgagcaatgagacctggaagaaagtcgagtgcgaacacgggtttggcagagtggtgtgtaaggtccctctcgactgtccttcctctacttggatccagtttcaggattcctgctacatcttcctccaggaagccatcaaagtggaatcaattgaagacgtgcggaaccaatgtacagaccacggagctgatatgatttccatacacaacgaagaagagaacgctttcatcttagatactctcaagaaacagtggaagggcccagatgatatcctgctaggaatgttttatgatacggatgatgcgtctttcaagtggtttgacaacagcaacatgacattcgataagtggaccgaccaggacgatgacgaagatcttgtggacacgtgtgcttttctgcatataaaaaccggggagtggaaaaaagggaattgtgaggtaagctctgtagaaggtaccttgtgcaaaaccgctattccgtacaaaagaaaatatctctcggacaatcacatcctcatctccgccttggtcattgcctcaacagtgatcttgaccgtgctgggtgctatcatctggtttctttataagaagcacagcgacagccggtttaccacagtgttctccacagcgccccagagtccctacaacgaggattgtgtcctggtcgtgggggaggaaaacgagtaccccgtgcagttcgattag

SEQ ID NO: 347 - DNA, 186 bp, Artificial Sequence
  Description of Artificial Sequence: Synthetic Transcript Sequence
atgaagcggttcctgttcctgctgctgaccatcagcctgctggtgatggtgcagattcagacaggcctgagtggacaaaatgacacatcacaaaccagctctcccagtgcgagtagcaacatttcagggggcatctttcttttcttcgtcgcaaacgcgattatacatttgttttgtttcagttag

SEQ ID NO: 348 - DNA, 1062 bp, Artificial Sequence
  Description of Artificial Sequence: Synthetic Transcript Sequence
atggagctgaccgagctgctgctggtggtgatgctgctgctgaccgccaggctgacattatcatcacctgcgccgcctgcctgcgacttgagagtgctgtctaagttgctgcgggactcccacgttctgcacagccgcctctcccaatgtcctgaggttcacccccttccaacccccgtgctactgcctgccgtggactttagtctgggagaatggaagacacagatggaggaaacgaaggcacaggatatcttaggcgccgtgaccctcctgctggagggagtgatggccgcccgaggccaactcggtccaacttgcctgtcctcactgctcggccagctgagcggccaagtccgcttgctccttggggctctccagagtctgctcgggacgcagctccccccccagggtcgaaccactgcccataaggatcctaatgccatttttctgtcatttcagcatcttctgagaggtaaagtcagattcctgatgttggttggtggcagcacactgtgcgtgaggcgggccccgcctaccacggccgttcctagtcggacctccctggtgctcacgttgaatgagctaccaaatcgtacatcagggctccttgaaacaaatttcaccgccagcgctagaactacaggcagcggcctcctcaaatggcagcagggttttagagctaaaatccccggactgttgaatcagacctcccgctccctcgaccagatcccaggttacctgaataggatacatgagctcttgaatggaactagaggtctgtttccagggccaagtagacggacactgggagcccctgacatctcttctggaacttcagatacggggagcctcccgccaaatcttcagcccggctattctccctctcctacgcaccccccaaccggacagtacacattattcccgctgcctccgaccctaccaaccccagtggtccagctccaccccctactcccagatccttcagcccccaccccgacacctacgtcccccctgctgaacacctcatacactcactcacagaatcttagtcaggaagggtag

SEQ ID NO: 349 - DNA, 537 bp, Artificial Sequence
  Description of Artificial Sequence: Synthetic Transcript Sequence
atgaccgtgctggcccccgcctggagccccaccacctacctgctgctcctgctgctgctcagcagtggcctctcaggcacccaagactgttcttttcagcattcaccaattagttcagattttgctgtgaaaattcgggagcttagcgactatctgctccaggactatccagtcaccgtcgctagtaatctgcaggatgaagaattgtgcggcggactgtggcgcctcgtgttagctcagcgttggatggagcggctcaagacagtggccggttcaaagatgcagggcctgctggagcgggtgaacacagaaatccactttgtgaccaaatgtgcctttcagcctcccccatcatgcttgcggttcgtccaaacaaacatttcaaggctgttacaggaaacgtcagagcaactggtcgctctgaaaccatggatcactcgtcagaacttttctaggtgtctcgaactccagtgccagccagttgaaaccgtctttcatcgagtctctcaggacggcctggacctactgacttcgtag

SEQ ID NO: 350 - DNA, 708 bp, Artificial Sequence
  Description of Artificial Sequence: Synthetic Transcript Sequence
atgaccgtgctggcccccgcctggagccccaccacctacctgctgcttttactcctcctgtcttcaggtctgagcggcacccaggattgtagctttcaacactctccaatcagctccgattttgccgtgaagatcagagagctgagtgattacctcctgcaagactatcccgtgacagttgcgtcaaatctgcaggacgaagaactttgcggggggctctggaggctggtgcttgctcaaagatggatggagcgactcaaaaccgtcgcgggctcaaagatgcaggggctcctggagagagtcaacaccgagatccacttcgtgaccaagtgtgcattccagcctcccccttcatgtctccgcttcgtgcagaccaacatcagtaggctcctccaagaaacatcagaacaactggtggctctaaaaccctggatcactcgccagaacttctctagatgtcttgagctgcaatgccagcctgattcatccacccttcctcctccatggagtccgcggcccttggaggcaactgcccccacagctccccagcctccattgctgttgctcctccttctccctgttggcttactcttgctggccgccgcatggtgtctgcattggcagcgaacccgtagaaggaccccgagaccaggcgagcaggtgcctcctgtgcccagtcctcaggacctccttcttgttgaacattag

SEQ ID NO: 351 - DNA, 1110 bp, Artificial Sequence
  Description of Artificial Sequence: Synthetic Transcript Sequence
atggtgtgggcccccctgggccccccccggaccgactgcctgaccttgctccatacaccctctaaagactctcccaagatgagcttagagtggttggtggcctggtcctggagcctcgacggtttacgggactgcattgccaccggtatccagtcagtgagagattgtgacaccaccgccgtgatcacagttgcctgtttactcgtgctgtttgtgtggtattgctatcatgtgggcagggaacagccacggccttatgtcagcgttaactctttaatgcaagccgcagacgccaatggcctgcagaacgggtatgtctattgtcaaagtcctgaatgcgttcggtgtacccataatgagggactgaatcagaagttataccataatctgcaggagtatgcgaaacggtatagctggtctggcatggggcgaatccacaaaggaatccgagaacagggccggtatctaaacagcagaccctcaatacaaaagccggaggtatttttcctgcctgatctcccaacaaccccttatttctctcgggatgcccagaaacatgacgtagaggtgctggagcggaactttcagacaatcctgtgcgagtttgagactctttataaggcattctccaactgctcactgcctcaggggtggaaaatgaacagcacccctagcggagagtggttcaccttctaccttgtgaaccagggcgtttgcgtgcctcgaaattgtagaaaatgccctaggacgtataggctcctcggttcactgagaacctgcatcggaaacaacgtgttcggaaacgcctgtatcagtgtcctgtcaccagggacagttattactgagcactacggaccgacaaatattcggatacggtgtcacctgggcctgaagacacccaacggctgtgagctcgtcgtgggcggggaaccccaatgctgggccgaaggacggtgtttgttatttgacgattcattccttcatgccgccttccacgaagggagtgccgaagacggccctagagtcgtcttcatggtggacttgtggcatcccaatgtggcagcagctgagcggcaggccctggacttcattttcgcccctggcagatag

SEQ ID NO: 352 - DNA, 1989 bp, Artificial Sequence
  Description of Artificial Sequence: Synthetic Transcript Sequence
atgcggccccagatcctgctgctgctggccctgctgaccctgggcttggccgcccaacatcaggacaaggtcccatgtaagatggtggacaagaaggtgtcgtgccaggtacttggccttctccaggtgccttctgtgcttcctcccgacacagaaacacttgatcttagtgggaaccagctacgtagtatcttggcaagtcctctcggattttataccgccttacgtcatttagacttaagcactaacgagatcagctttcttcagcccggtgcctttcaggctctaacgcacctcgagcatctgtctctggcccacaaccgactggctatggcaacagccctgagcgcgggaggactcggaccactgccacgagttacctccctggacctcagcgggaattcactctactctgggctcctggaaagattattgggggaggctccctctctccacacccttagcctggccgaaaacagtttgactagactgactcgccacaccttccgcgacatgccagccttggaacagttagatctccattccaacgtgctgatggacatcgaggacggcgcatttgaggggttgcctagattgacccacctgaacctgagccgcaacagcctaacttgtataagcgacttttccctgcagcagctccgggtgcttgacctcagttgtaatagtatcgaggcctttcagaccgctagtcagcctcaggctgagtttcaactgacctggctcgatcttcgggaaaacaagcttcttcattttccggatctggccgccctcccgaggcttatttacctgaatctgagtaacaatctgattcgtctccctacggggcctccccaggactcgaagggcatccacgccccttccgagggatggagtgcgctgcccttgtctgccccaagcggcaatgccagcggacgtcccctttcgcaactgctcaatctggatctgtcgtataatgaaatcgaactgatccctgacagttttttggagcacttgacatctctgtgctttttgaatctgagcaggaactgcttaagaacatttgaagccaggcgattggggagcctgccatgtttaatgctgcttgacctgtctcacaatgctctggagactttagagctaggggcgagagcccttggtagcctccggaccctgcttctgcagggaaacgctcttcgcgacctgccaccatatactttcgcaaacctggccagtctgcagcggttaaatcttcagggaaatagggtaagtccctgtggagggcctgacgagcccggccctagcggctgtgtggcattcagcgggatcacatctctaagatcattgagtctggtcgacaatgagatcgaactcttacgagccggagctttcctgcatacgcccctgaccgagctcgacctcagttccaacccgggattggaggtggccacgggcgccttggggggactggaagcctcactcgaagtcttagctctacaaggtaacggactgatggtcctgcaggtggatctaccttgcttcatctgcttaaagaggttgaatctagcggaaaaccgactgagccacctgccagcctggacccaagctgttagtctggaggtcctcgatctgaggaacaactcatttagtttactgcccgggagcgccatgggaggcctcgaaacgtccctgcggcgcctgtacttacagggaaatcccttgtcctgctgcgggaacggttggctggccgcacaacttcatcagggaagagttgacgtcgatgccacccaagacctgatttgcagattcagctctcaggaggaggtgtccctttcccacgttaggcccgaggactgcgaaaaaggcgggctgaaaaatattaatttgatcattattctgacttttatcctcgtgtcagctattcttttaacgacgctagctgcatgttgttgcgtgcgcaggcaaaagtttaaccagcaatacaaagcttag

SEQ ID NO: 353 - DNA, 1989 bp, Artificial Sequence
  Description of Artificial Sequence: Synthetic Transcript Sequence
atgcggccccagatcctgctgctgctggccctgctgaccctgggccttgcagcgcaacatcaggacaaggtcccttgcaagatggtcgacaagaaggtttcttgccaagtgctgggcttgctccaagtgccttcggtgctgcctcccgacacggagactctggaccttagtggtaaccagctgcgctccattctagcttccccactcggcttctacaccgcattgcggcacttagatctcagtaccaatgaaatctcttttttgcaacctggtgccttccaggcactcacccatttggaacacttaagcctggcccacaaccgactggccatggctacggccctgtctgccggggggctgggacctttaccacgtgtgactagtcttgacctgtctggcaatagtctgtatagtggcctcctggaacggctcctcggagaggccccttccctgcacactctgtcgctcgctgaaaattcccttacacgcttgaccagacacacctttagggacatgccagcactcgagcagctcgacttgcattcaaatgtgctgatggacattgaagacggggcgtttgaggggcttccaagacttacccacctgaacctgagccgaaattcactcacttgtattagcgattttagcctccagcagctacgtgtgcttgatctatcgtgtaactccattgaggccttccagacagcatctcagcctcaggccgaattccaactgacctggttagatttgcgcgaaaataagttgctccattttccagacctagctgccctgcctagactgatttacctgaacctgtctaataacctcattcgactacctaccggcccccctcaagactcaaaaggaattcacgctcctagcgaagggtggtcagccctccctctgtctgctccttctggcaatgcctccggccgcccactgagccagctgctgaacttggatctgtcctataatgagatagagctgatccccgatagctttctggaacacctaacctctttatgttttctgaatctcagcagaaattgtctccggacctttgaagccagaaggcttggaagcttgccctgtcttatgttactcgatctttctcacaacgccttggagaccctcgagctgggggcccgtgctctgggctctctgcgcactttgctgctacaaggaaacgctctgagagatctgcccccttacaccttcgcaaatcttgcctctctgcaacgactgaacctgcagggaaatagggtctctccatgtggagggccggatgaaccaggccccagcggctgcgtcgccttcagtggaataaccagtcttcgcagcctcagcctggtcgacaatgaaattgagctgcttagggctggagcttttctgcacacaccgttgacagaattggatttaagtagtaatcctgggctcgaagtggctactggggcactggggggactcgaagcgagtctggaagttttggcactccagggcaacgggctgatggtgctgcaggtggacctgccgtgttttatatgcctgaaacggctcaaccttgcagaaaataggctgagccatctgcctgcctggacccaggcagtgagcttagaagtcttagacctgaggaacaacagcttcagcctgctgcctgggagcgccatgggcggtctggaaacctcattacggagattgtatcttcagggaaatcctctctcatgttgtggcaatggctggctagcggctcagctgcaccagggtcgagtcgacgtggacgccacacaggatctgatatgccggttctccagccaggaagaagttagcctgtctcatgttcggcccgaggattgtgaaaagggtggcttgaaaaatataaatttaatcatcattctgacatttatattagtttctgcaattctcctgacaacattggcagcttgctgctgtgtcaggagacagaagttcaatcaacagtataaggcttag

SEQ ID NO: 354 - DNA, 1989 bp, Artificial Sequence
  Description of Artificial Sequence: Synthetic Transcript Sequence
atgcggccccagatcctgctgctgctggccctgctgaccctgggcttggcagcccaacaccaggataaagtgccttgtaagatggtagacaaaaaggtgtcctgtcaggtgttaggtttactgcaagttccttctgtgcttccaccagatacggaaactctggatctctctggaaaccagcttcggagcatcctggctagcccattgggcttctatactgccctgcggcatctggacctgagtaccaatgagatcagctttctacagccgggagctttccaggctctgactcatctagaacatttgtcactggcacacaacagattggccatggctaccgcactgtcagcaggtggcttggggccgctaccccgagttacaagtctggacttatctgggaattcactctattccggcctgctggagcggctgttaggggaagcccctagcctccatacccttagtctggccgagaactctttgacccgcttgacgaggcacacttttcgcgacatgcctgccttggaacagctagacctccatagcaacgttttgatggatattgaggacggggccttcgaggggctgcctcgcctgacccatctgaacttgagccggaattcccttacctgtatttccgacttcagtctgcagcagctgagagtgcttgacctatcctgcaattctatcgaagcctttcagacagcgagccagccccaggctgagtttcagctgacctggttggatctgcgcgagaataagttgctgcattttccagacttagccgccctccctagacttatctatctcaacctttcaaataatttgattcgactccctaccggccctccacaggactccaaaggcatccatgccccctcggagggatggtccgcactgccactttcggcgccctcaggcaacgcttccggccgtcccctgagtcagctgctgaatttggacctcagctacaatgaaatcgagctcattcctgattcgtttttggaacacctaacaagtctgtgcttccttaatctcagccgcaattgtctgaggacttttgaggcccgtcggctgggtagcctgccctgcctgatgttactagacctgtcgcacaacgcgttagagacattagagctcggagcaagggcactgggatctctgcggacactcttactgcagggcaacgcattgcgcgacctccctccatacaccttcgccaacttggcttcacttcagcggttgaatctccaaggaaatcgagtgtcaccttgcggcgggccagatgagcccggaccgagtggatgcgtggcatttagcgggatcacgtcgctgaggagcctgtcactggttgacaatgagatcgagctcctcagagcaggagcatttctacacacgcctctaacagaattagatctgtccagtaaccccggactagaagtggctactggcgcactgggtggcctggaagcaagtctggaagttctcgcacttcaggggaacggactaatggtgctacaggtcgacctgccctgcttcatctgtctgaaaagactgaacttggccgagaataggcttagtcatcttcctgcctggactcaggccgtatcattagaggtgctggacctgcggaataattccttttcgctcttgcctgggagtgcaatggggggcctcgagaccagcctccgtagactatacctacaggggaatccattatcgtgctgcggaaacggatggctggccgcccagctgcatcaaggacgcgtcgacgtggacgcaacacaagacttaatctgccgctttagttcccaggaggaagtaagcttatctcatgtccggccagaagactgtgagaaggggggcctgaagaacataaacctgattattatccttacctttatcctcgtttcagctattttacttacaaccctcgctgcctgttgctgcgtcaggagacaaaagttcaaccagcaatataaagcctag

SEQ ID NO: 355 - DNA, 561 bp, Artificial Sequence
  Description of Artificial Sequence: Synthetic Transcript Sequence
atgcggccccagatcctgctgctgctggccctgctgaccctgggcctggctgcacagcaccaagataaggtgccatgtaagatggttgacaaaaaggtgagctgtcaggtattaggcttgcttcaagttccctcagttctccctcccgatacagagacgctggatctgtccgggaaccagctccgctcgattctcgcttccccactgggattctacacagccctgcgtcacttggacctctcgactaacgagatcagcttcctccagccaggtgcctttcaggcattgacccacttggagcacctgtctctagcgcataacagacttgctatggcaactgctctgtcagctggcggtctgggacctcttccgcgcgtcacatcgttggatctcagtgggaactcattatacagcggcttactagagcgcctgcttggagaagcgccctcactgcataccctatcacttgctgagaattcactgactagactgactcgacacacctttagggacatgccagcactcgagcagctggacctgcacagcaatgtcctgatgtag

SEQ ID NO: 356 - DNA, 1212 bp, Artificial Sequence
  Description of Artificial Sequence: Synthetic Transcript Sequence
atggcccacgccatggagaacagctggaccatcagcaaggagtaccacattgacgaggaggttggatttgcccttcctaaccctcaggaaaacttaccagatttctacaacgactggatgttcatagcgaaacacttacccgatttaatcgaatcggggcaacttcgggaaagggtcgagaaacttaacatgctgagcattgaccacttgactgatcacaagtcacaaaggctggcaagattggtgctggggtgtatcaccatggcatacgtgtggggaaaaggccatggcgatgtgcgcaaagtcctgcctcgaaacatcgctgtgccctattgtcagttatctaaaaagctggagctgccccctattctggtgtatgccgattgtgtcctcgccaattggaaaaagaaggatccgaataagcccctgacgtatgaaaacatggacgtcctcttctccttccgtgacggcgactgctctaaaggcttctttctggtgtctctgctggttgagatagcagcagcttccgccattaaagttattccaacagtgtttaaggccatgcaaatgcaggaacgtgatactttgctgaaagcactgttggaaatcgcatcttgcctggaaaaggctctacaggttttccatcagatccacgatcacgtgaatcccaaagcctttttcagtgtgttgagaatctatcttagcgggtggaaaggaaaccctcagctgagtgacgggctcgtgtatgaagggttttgggaggatcccaaggagtttgctggggggtcagcaggacaatcaagcgtgtttcagtgcttcgacgtcctgctgggaatccagcaaactgctggtggtgggcacgctgctcaattcctccaggacatgcgtcgctacatgccaccagcccacaggaattttctgtgttccctcgagagcaacccctccgtgcgggagttcgtgctgagtaagggagatgcagggcttcgcgaagcatatgacgcatgtgtgaaagccctggtaagcctgcgctcataccatctgcagatcgtgacaaagtatatcctgatccccgcatcacagcagcccaaggagaacaagactagtgaggacccgtccaagttggaagccaaaggtacaggcggaaccgacctgatgaatttcttaaaaacagtcaggtcgacaactgaaaaaagcctgctgaaggaaggctag

SEQ ID NO: 357 - DNA, 237 bp, Artificial Sequence
  Description of Artificial Sequence: Synthetic Transcript Sequence
atggcccacgccatggagaacagctggaccatcagcaaggagtaccacattgacgaagaagtgggttttgcactgccgaatccccaagagaacctccctgacttctacaacgattggatgttcatagcgaagcacctccctgacctcattgagtctggtcaactgcgtgagcgggtcgagaagctcaatatgctgtccattgatcacttgaccgaccacaaaagtcaacgcctgtag

SEQ ID NO: 358 - DNA, 543 bp, Artificial Sequence
  Description of Artificial Sequence: Synthetic Transcript Sequence
atggcccacgccatggagaacagctggaccatcagcaaggagtaccacattgacgaagaggtcggctttgccctgccaaacccccaggaaaatttgccagacttctacaacgactggatgttcattgccaaacacctccccgacttaattgagtccggacagctgcgcgaaagggtggagaagctgaacatgctcagcattgatcacctgacagaccataagagccagagactggcgaggctggtcctgggttgtatcaccatggcctacgtttggggcaaaggccacggcgacgtgaggaaagtccttcctaggaacattgccgtgccttattgtcagctctccaaaaagctggagttgccacctatcctcgtgtacgccgattgtgtgctagcgaactggaagaaaaaggatcctaataagcccttaacgtatgaaaatatggacgtgctgttctctttcagagatggcgactgcagtaaaggattttttctcgtcagcctactggtggagatcgcagctgcctctgccatcaaagtgtag

SEQ ID NO: 359 - DNA, 1212 bp, Artificial Sequence
  Description of Artificial Sequence: Synthetic Transcript Sequence
atggcccacgccatggagaacagctggaccatcagcaaggagtaccatattgatgaagaggtcggcttcgctctgccaaaccctcaagaaaacttacccgacttttacaatgactggatgttcatcgccaaacatctgcctgatctaattgagtcagggcaattgcgtgaacgggtcgagaaactgaacatgttgagcattgaccatctcacggaccataagagtcaaaggctggcccggctggttctgggatgtattacgatggcctatgtgtggggcaagggccacggcgatgtgcgcaaagtgctgcctcggaacatagcagtgccctactgtcagctgagtaagaaacttgaacttccaccaatcctcgtgtacgctgactgcgtgctcgccaattggaaaaagaaagaccccaacaagcccctcacttacgaaaatatggatgtcctgttctctttcagggatggtgactgctcaaagggctttttcctagtgtcgttactcgttgaaattgctgccgcatcagcgatcaaggttattccgaccgtctttaaagcaatgcagatgcaggaacgggacactctgctcaaggccctgctggagatcgccagctgtctggagaaagcccttcaagtcttccaccagatccacgatcacgttaacccgaaggcgttcttttcagtgttacggatttacctttctggttggaagggtaatcctcagctatcggatggattggtctatgaggggttttgggaagaccccaaggagttcgccgggggcagcgctggccaaagctcagtcttccagtgctttgatgttctgctgggcatccagcagaccgctggcggaggacacgctgcccagttcctgcaagacatgcgacgctacatgccaccagcccaccgcaatttcctgtgctctttagaatcgaatccatctgtaagggaattcgtgcttagcaagggggacgctggactccgggaagcttatgatgcttgcgtcaaggcacttgttagcctgaggagttaccatctgcagattgtgacaaaatacatcttgatcccggctagccaacagcccaaggagaacaaaacgtctgaggaccctagcaagctggaagctaaagggacaggcggtaccgacctcatgaatttcctgaagacggtgcggagtaccacggaaaagtcattactaaaggagggctag

SEQ ID NO: 360 - DNA, 144 bp, Artificial Sequence
  Description of Artificial Sequence: Synthetic Transcript Sequence
atggcccacgccatggagaacagctggaccatcagcaaggagtaccacatagacgaggaggtgggtttcgctctgcctaatccacaagagaaccttccggatttctacaacgattggatgttcattgccaaacatctgccttag

SEQ ID NO: 361 - DNA, 1224 bp, Artificial Sequence
  Description of Artificial Sequence: Synthetic Transcript Sequence
atggagccccaccggcccaacgtgaagaccgccgtgcccctgagcttggaatcctatcacatcagcgaagagtatgggttccttttgcctgacagcctgaaagaattacccgatcattatcgaccatggatggaaattgccaataaactgccacagctaatcgatgcccatcagttgcaggcgcacgtagataagatgcccttacttagttgtcagttcttgaaaggccatcgagaacagcggctggcccaccttgtgttgagcttccttaccatggggtatgtgtggcaagaaggcgaagcccagcctgcagaggtcctgccacggaacttggcactccccttcgttgaagtgtcacgaaacctagggctgcctcccatcctggttcacagtgacctggtcctgacaaactggacaaagaaggatcctgacggctttctagagatagggaacctggagaccattatatctttccctggaggagagtcactgcatggcttcattttggtgaccgccctggttgagaaagaggcagtgcctggtatcaaagctctggtccaggccaccaacgctatcttacagcctaatcaggaagctctccttcaagccctacagcgtctgaggttaagcattcaggatattactaagaccctgggtcagatgcacgactacgtggaccccgacattttctacgcgggaatacgcatcttcctgtcgggctggaaggacaacccggccatgccagctgggttaatgtatgagggagtctcacaagaacctcttaaatactctgggggcagtgctgctcaaagcaccgtactgcatgctttcgacgagttcctgggaatcagacacagcaaggaaagcggcgattttttatatagaatgcgcgattacatgcctccctcccataaggcttttatagaggacatccattcagcaccgagcttgagggactacattctctcctctggccaggatcatctcttgactgcgtataaccaatgcgtccaggccctggccgaactcaggtcataccatataactatggtgactaagtatcttataactgcggcggccaaagcgaaacacggtaaacccaaccatcttccaggacctccacaggcgctcaaggacagaggtaccggaggaactgctgtgatgtccttcttaaagtctgtaagggacaaaacgctcgaaagcatcctgcaccctaggggatag

SEQ ID NO: 362 - DNA, 1263 bp, Artificial Sequence
  Description of Artificial Sequence: Synthetic Transcript Sequence
atgctgcacttccactactacgacaccagcaacaagatcatggagccccacaggcccaacgtcaagactgctgtccccctgtctcttgagagctaccacatctcagaggagtacggttttctgctgccagactctttaaaagagttaccagaccactaccgaccttggatggagatcgctaacaaacttccccagcttattgacgcccaccaactgcaggctcacgtggataagatgcctttactgagctgccagtttctcaaaggccaccgggagcagcgacttgctcatcttgtgctgtcctttctaactatgggatacgtttggcaggagggggaggctcagcccgccgaggtgctgccacggaacctcgccttgccttttgttgaggtatcccgcaacctcggcttgcctcccattctggtccactccgaccttgtgctgacaaactggaccaaaaaagaccccgatggcttcctcgagattggcaacctagaaacaatcatctctttccccggaggcgaatccctgcatggattcatcctggtcaccgctttggtagaaaaggaggccgtgcctgggattaaggcactggtccaagcgacaaatgccattcttcaacctaaccaggaggccctgcttcaggccttacagaggctgcggttatccattcaagatattactaaaaccctgggccagatgcacgactacgttgatccggatatcttttacgcagggatccgtatcttcctgagtgggtggaaagacaaccctgccatgcctgcaggattgatgtatgagggagtgtcacaagagcctttgaagtatagtggcggatccgcagctcagagcaccgtgcttcacgcctttgatgaattcctgggaattcgccattcgaaggagtctggcgactttctctaccgcatgagggattacatgcccccgagccacaaggcttttatagaggacattcactccgccccatcacttcgagattatattctctcatctggccaggatcatctgttaactgcttataatcaatgtgtgcaagccttggcggagttgagatcctaccacattacaatggtaacaaaatacctgatcacagccgcagcaaaagcaaagcatgggaaacctaaccatctgccggggccaccacaggccctcaaagaccgtgggaccggtggcaccgccgtgatgtcctttttaaagagcgtccgtgataaaactctcgaaagcatcttgcacccccgagggtag

SEQ ID NO: 363 - DNA, 537 bp, Artificial Sequence
  Description of Artificial Sequence: Synthetic Transcript Sequence
atgcacagcagcgccctgctgtgctgcctggtgctgctgaccggcgtgcgggccagcccgggtcagggtacccaatcagagaacagttgcacgcactttcccggcaatctgccaaatatgctaagggacctccgggatgcgttcagccgtgtcaagacattcttccagatgaaagaccaactcgataacctcctgctaaaagagagcctgttggaagatttcaagggatatttgggctgccaggccctgtcagagatgatccagttctacctcgaagaagtcatgccacaagcggagaatcaagatccagatataaaagctcacgtgaacagcctaggagagaacttgaaaacactgcgccttcgtctgcgccggtgtcacagattcctgccctgcgagaacaagtccaaagcggtggagcaggtgaagaacgcctttaacaaactgcaggagaaaggcatctacaaagctatgtcggagttcgatattttcatcaactacattgaagcttatatgacaatgaagatacgcaattag

SEQ ID NO: 364 - DNA, 762 bp, Artificial Sequence
  Description of Artificial Sequence: Synthetic Transcript Sequence
atgtggccccccggcagcgccagccagcccccccccagccccgccgcggctacaggccttcacccagctgccagacccgtgagccttcagtgccgcctgagtatgtgcccagccaggtcactcttgttagttgcaactttggtgctgttagaccatctgagtctggcacgcaacctgccagtggctactcccgatcccggcatgtttccctgcctgcatcacagccaaaatctgcttcgtgctgttagcaacatgctgcagaaggcacgccagaccttggaattctacccatgcacttcagaggagatcgatcacgaggacatcacaaaagataagactagtactgtcgaggcttgtctgcccttggaactcaccaagaacgagtcctgcctgaatagccgtgagactagcttcattactaatggttcctgtctggccagccgcaaaacatccttcatgatggcactttgcctctcaagtatctacgaggacctgaaaatgtatcaggttgagtttaagacgatgaacgccaaattattgatggaccccaagagacagattttcttagatcagaatatgttggcggtgatcgacgaactgatgcaagcgctgaacttcaactccgaaaccgtgccacaaaagtctagcctagaggaacccgatttctacaagactaaaatcaagttgtgcatcctgttacatgctttccgaattagagccgtgactatcgatagggtcatgtcttacctgaacgctagttag

SEQ ID NO: 365 - DNA, 720 bp, Artificial Sequence
  Description of Artificial Sequence: Synthetic Transcript Sequence
atgtggccccccggcagcgccagccagcccccccccagccccgccgcagccactggtctgcatcccgccgctcggccggtgagcctgcagtgtcggctctctatgtgtcctgcaagaagtctattgttggtcgcaaccctggtcttactggatcacctttcccttgctcgtaacctaccagtggccacccccgacccgggaatgttcccctgcctccaccactctcaaaatcttctgagggccgtctcaaacatgcttcaaaaggcgaggcagaccctggagttctacccctgcacttctgaggaaattgaccatgaggatatcacaaaagacaaaacatccactgtcgaagcttgccttccgctcgagctcaccaagaatggatcctgtctggcttcaaggaagacctcgttcatgatggctttatgcctgagttcaatatacgaggatctcaagatgtatcaagtagaatttaagacaatgaacgcaaaattactgatggatccaaaacgacagatcttcttagatcaaaacatgctggcagttattgatgaactcatgcaggctcttaatttcaattctgagaccgtgccccagaagagtagtttagaggagccagacttttataagaccaagatcaagctgtgtatcctgttacacgcattccggattcgggcagttacgatcgacagagtgatgtcctatttgaacgcctcctag

SEQ ID NO: 366 - DNA, 648 bp, Artificial Sequence
  Description of Artificial Sequence: Synthetic Transcript Sequence
atgtggccccccggcagcgccagccagcccccccccagccccgccgccgccaccggtctccacccggctgctcgacccgtctctcttcagtgcagactgtcaatgtgcccagccagaagcctgctgttggttgccaccctagtgctcttggatcaccttagtcttgcgaggaatctacccgttgccactcccgaccccggtatgttcccgtgccttcaccactcccagaatttattacgggcagtaagcaacatgctgcagaagaacgagagttgtctgaattcccgggagacctccttcattacgaacggctcttgcttggccagccgcaaaacatcatttatgatggcattatgccttagttctatttatgaagacctaaagatgtaccaggtggaatttaaaacaatgaatgctaagctgctcatggacccaaagcgccaaattttcctggaccagaatatgctcgccgtgatcgatgaattgatgcaagctctgaacttcaattcagaaactgtccctcagaagagctcactggaggaacccgacttctacaaaactaagattaagctctgcattctgcttcatgcctttcgtatccgggctgtgacaatagatagggtcatgagctacctgaacgcctcttag

SEQ ID NO: 367 - DNA, 429 bp, Artificial Sequence
  Description of Artificial Sequence: Synthetic Transcript Sequence
atgagcctgctgcccgtgccctacaccgaggccgccagcctgagcaccggcagtacggtcaccataaaaggacgccctctggcttgtttccttaacgagccttatctgcaagtagacttccacacggagatgaaagaagagtctgacatagtgtttcatttccaggtgtgttttgggcgtcgcgttgtgatgaactctcgcgagtacggagcctggaaacagcaggttgagagcaagaatatgccattccaggacgggcaggagttcgagctttccatatccgttcttcccgacaagtatcaggtcatggtaaatggacagtcatcctatacctttgatcatcgaattaaacccgaggccgtgaaaatggtgcaggtgtggcgggacatcagtctgactaaattcaatgtgtcctatctgaagcgatag

SEQ ID NO: 368 - DNA, 657 bp, Artificial Sequence
  Description of Artificial Sequence: Synthetic Transcript Sequence
atgagcttcgtgggcgagaacagcggcgtgaagatgggcagcgaggattgggaaaaggacgaacctcaatgttgtctggaggatccagcagggtcacctctggagcctggacccagcctcccaaccatgaacttcgtccacacgtcacccaaggtgaaaaacctcaatcccaagaagttttcgatccacgatcaggatcacaaggtcctggtgctcgattctggaaacctaatcgctgtccctgataagaactatattaggcccgaaatattttttgcactagccagcagtctgtcgtctgctagtgccgagaaaggatcccctattctcctcggagtgtccaagggagagttttgtctctactgtgataaggataagggtcagagtcatccgagtctacagctgaagaaagagaagctaatgaaactggcagctcaaaaagaaagcgcccggaggccatttatcttctatcgagcccaagtaggatcctggaacatgcttgagagcgcagcccaccccggctggttcatctgtaccagctgtaattgtaatgagccagtcggcgttactgataaatttgaaaatcgcaaacacattgagttttccttccagcctgtgtgtaaggccgaaatgtccccttccgaggtctcggactag

SEQ ID NO: 369 - DNA, 579 bp, Artificial Sequence
  Description of Artificial Sequence: Synthetic Transcript Sequence
atgagcggctgcgaccggcgggagaccgagaccaagggcaagaacagcttcaaaaaaaggctgcgtggccccaaggtgaaaaacctaaaccctaaaaagtttagtattcatgaccaggatcataaagtgttggtactggacagcgggaacttgatcgctgtgccggacaaaaactacattcgacccgaaatattctttgccctggctagttctcttagttctgcaagtgccgagaagggatccccgatactgctgggcgtgagtaagggcgagttctgcctgtattgcgacaaagacaagggtcaaagccatccctcactccagctgaagaaagagaaactgatgaagctggcagctcagaaagaatcggcccgtcgccccttcatattctatcgggcccaagtgggctcctggaatatgttggagagtgccgcccaccccggctggtttatttgcacctcttgtaactgcaacgaacctgtaggtgtaacggacaaattcgagaataggaagcacattgaattctccttccagccggtttgcaaagctgagatgagcccaagcgaggtgagtgattag

SEQ ID NO: 370 - DNA, 474 bp, Artificial Sequence
  Description of Artificial Sequence: Synthetic Transcript Sequence
atgagcttcgtgggcgagaacagcggcgtgaagatgggcagcgaggactgggaaaaagacgagccgcagtgttgcctcgaagaaattttctttgcgctggcatcatccttatcgtccgcatccgcggaaaagggaagcccaatccttctgggagtgtctaaaggggagttttgcctttattgcgacaaagacaaggggcagtcacatccatcactgcaactcaaaaaagagaagctgatgaaactggctgcccagaaggagtcagctagaaggccatttatattttaccgggcccaggtcggctcctggaatatgctcgaatcggccgcacaccccggttggtttatttgtacttcatgcaattgtaacgaacccgtcggcgtaactgataagttcgaaaaccgaaagcacattgaatttagctttcagcctgtttgtaaggcagagatgagccccagcgaggtctctgactag

SEQ ID NO: 371 - DNA, 594 bp, Artificial Sequence
  Description of Artificial Sequence: Synthetic Transcript Sequence
atgagcttcgtgggcgagaacagcggcgtgaagatgggcagcgaggattgggagaaggacgagccacaatgctgcctagaagggccaaaggtcaaaaacctcaatcctaaaaaattttcaatacacgaccaggaccacaaagtgctcgtgctggactcaggaaatttgattgcagtccccgataaaaattacattcggcccgagatctttttcgcattagcgagttcactgagttcagcctccgccgagaaaggaagtcccatactgcttggagttagcaaaggcgaattctgtctgtactgtgataaagacaaaggccagagtcacccttccttgcagctgaagaaagagaagttgatgaagttggccgcacagaaggaatccgcacgccggccttttatattttatagagctcaggtgggaagttggaatatgctggaatctgccgctcacccaggatggtttatttgcacaagttgtaattgtaatgagcctgtgggcgtgacagacaaatttgaaaatagaaaacacattgaattcagctttcaaccagtgtgtaaggctgagatgagcccttccgaagtcagcgactag

SEQ ID NO: 372 - DNA, 537 bp, Artificial Sequence
  Description of Artificial Sequence: Synthetic Transcript Sequence
atgagcttcgtgggcgagaacagcggcgtgaagatgggcagcgaggattgggagaaagacgaaccacagtgttgcctggaagaccctgcaggctcccctcttgaacccgggccgtcacttcctaccatgaatttcgtccacacgaagatcttttttgcacttgccagctctctcagtagcgcttcagctgaaaaggggagtccaatactcctcggagttagcaagggtgaattctgcctgtattgtgataaagataaaggacagagtcacccttccctgcagctgaagaaggagaagttaatgaaattagcagcacagaaagagagcgcgcgccgcccttttattttttaccgggcacaggtaggctcttggaacatgctggagagtgcagctcaccccggatggtttatttgtaccagttgtaactgtaacgagccagttggcgtgaccgacaaatttgagaacaggaaacacatagagttcagtttccagccggtttgtaaggcagagatgtccccgtccgaggtgtcggattag

SEQ ID NO: 373 - DNA, 1344 bp, Artificial Sequence
  Description of Artificial Sequence: Synthetic Transcript Sequence
atgatccccaccttcaccgccctgctgtgcctgggcctgagcctgggtccccggactcacatgcaggcgggcccgctcccaaagcccacactttgggccgagcccggtagcgtcatcagttggggaaactcggtgacgatctggtgtcaggggaccctggaggccagagagtatcgattggacaaggaggaatcaccggcaccctgggaccgccagaacccactggagcctaagaacaaggcacggttctcaatccccagcatgaccgaggactacgccggacgctatcgttgctactaccgaagccccgtgggctggtcccaaccatcagacccactggagctcgtgatgacaggagcctacagcaaacctacactttccgcattgccctctcccctggtgacaagcggaaaaagcgtgacgctgctttgtcagagcaggagccctatggacaccttcctgctcatcaaagagagggcagcgcaccccctgctccaccttcgttccgagcacggggcccagcagcaccaggctgagtttccgatgagccccgtgacaagcgtgcatggcggaacataccggtgttttagcagccacgggttctctcattatttactcagtcacccctcggatcccctggaactcatcgtctccgggagcctggaagatccccggcctagtccaaccagaagcgtctccaccgcggccgggcctgaggatcaaccattgatgcctactggcagcgtccctcactcaggtcttagaaggcactgggaggtccttatcggagttctggtggtgtcaatcctcctgctgagccttctcctcttcttgctcctgcagcactggaggcagggaaaacaccgtacactagctcagagacaggctgactttcagcgacctccaggcgccgccgagcctgaacctaaggatggaggcctgcaacggagatcttcacccgcagccgatgtccagggggagaacttctgtgccgccgttaagaatacccagcctgaagacggcgtggaaatggatacccgcagtccgcacgacgaggacccgcaggcagtgacttatgccaaagttaagcattcacgacccagacgcgaaatggcttctcccccatcaccgctctctggcgagttcctggataccaaagacagacaggccgaggaagacagacagatggacactgaggctgcagcctccgaagccccccaggatgtcacctacgcccagctgcatagttttacattgcgccagaaggctaccgaacccccaccttcacaggagggggcctctcctgccgaaccgtccgtgtatgctactctggcaatccattag

SEQ ID NO: 374 - DNA, 636 bp, Artificial Sequence
  Description of Artificial Sequence: Synthetic Transcript Sequence
atggtggcccacaaccaggtggccgccgacaacgccgtgagcaccgcagcagagccacgccggaggccggagccgagttcttccagttcctcatctccggccgccccagcccgccctcgcccttgtcccgctgttccagcacccgctccaggagatacccactttcgcactttccggagccatgcagattatagaagaattacccgtgcctcagctcttctcgatgcctgcggcttttactgggggccccttagcgttcacggagcacatgaacgtctgcgcgcagaaccggtgggtactttcctggtgcgggacagtaggcagaggaattgctttttcgcattgagcgtcaagatggcatcagggcccacaagcatacgtgtgcacttccaggcgggaaggttccaccttgacgggtccagggagtccttcgactgcttatttgagctacttgagcactacgtcgctgccccgcgccgcatgttgggtgctcccctccgacaacgtagagttcgaccactgcaggaactctgccgtcagcggatagttgctaccgtcggccgggagaatctagcgcggatccccctgaatcctgtcctcagagactacctctcttccttcccttttcagatctag

SEQ ID NO: 375 - DNA, 1596 bp, Artificial Sequence
  Description of Artificial Sequence: Synthetic Transcript Sequence
atggccgccaccctggacctgaagagcaaggaggagaaggacgccgaactcgataagcgcatcgaagcactccggcgcaagaacgaggctctgattagaaggtatcaggagatcgaggaggacaggaagaaagccgaactagagggggtggctgttactgcgcccaggaagggccgaagcgtggagaaggagaatgtggccgtggagtcagagaagaaccttgggccgtcccgcaggagtccaggtacgcctcgaccccctggcgcttccaaaggcgggagaacgccaccccagcagggaggacgcgccgggatgggccgcgcgtcacggagttgggagggatcaccaggcgagcaacccagaggtggcggagccggtgggagggggcggagggggcgcggccggggctcgccacatctctctggagctggagacacctctatatctgatcggaaaagcaaagagtgggaggagaggcgccgccaaaacattgagaaaatgaatgaggagatggaaaagattgccgaatatgagcgaaatcagcgggaaggcgtcctcgagcctaacccagtgcgcaatttcttagatgatccccgacgcaggtccggaccgctcgaggagtcagaacgcgataggcgtgaagagagccgccgccatggccgcaactgggggggacctgattttgaaagagtcaggtgcggccttgaacacgaacggcagggcagacgcgcaggtctcggatctgccggagacatgacactcagtatgacaggccgagaacgcagcgagtatttacgttggaaacaggaacgggagaagatagaccaggaacgcttgcagagacatagaaaacctactggccagtggcgaagggaatgggacgctgagaagaccgacggaatgtttaaggatggaccagtgccagctcacgagccatctcacaggtatgacgatcaggcctgggctcggcccccgaaacctcctacttttggagagttcttgagccagcacaaggctgaggccagctctaggaggcggcgaaaatcaagtcgtccgcaggccaaagctgcacctcgcgcatacagcgatcacgatgatagatgggagactaaggagggggctgccagccccgctccagagacgcctcaaccaacaagtccagagacgagccccaaagagacaccaatgcaaccgccggagattcctgccccagctcatcgtcctccagaagacgaaggcgaggagaacgaaggggaggaggatgaagagtgggaggacatctcggaagacgaagaggaagaagagatcgaggttgaggagggggatgaggaagaaccagctcaggatcatcaagcaccagaggccgccccaacgggtattccctgtagtgagcaggcccacggtgttccatttagccccgaagaacccttgttagagccacaagcacctggcaccccttcatcaccgttctccccgccgagcggccatcagccggtcagcgactggggcgaggaagtggagctgaactctccacgcacaacccacttagccggggccctctcccccggagaggcctggccattcgaaagcgtctag

SEQ ID NO: 376 - DNA, 531 bp, Artificial Sequence
  Description of Artificial Sequence: Synthetic Transcript Sequence
atgcggatttttgccgtgtttatatttatgacatattggcatctactgaatgccccatataacaagattaaccagcggatcttagtcgtagaccccgtgaccagtgaacacgagctcacttgccaggcggaagggtatccgaaagccgaggtcatctggacaagcagcgatcatcaggtgctgtcgggaaagaccaccaccaccaactccaagcgggaggaaaagctttttaacgtgactagtactttgcgtattaacaccaccacaaatgagattttttactgtacgttccggaggctggaccccgaagaaaaccacacagctgagctcgtcattccagaacttccactcgctcaccccccaaatgagcgcacccacctggttatccttggagcgattctgctctgccttggggtggctctgacatttatattcagacttcgaaaggggagaatgatggacgtcaaaaagtgcgggatccaggatacaaattccaaaaaacagtccgacactcatctggaagagacatag

SEQ ID NO: 377 - DNA, 873 bp, Artificial Sequence
  Description of Artificial Sequence: Synthetic Transcript Sequence
atgcggatcttcgccgtgttcatcttcatgacctattggcacttactgaacgcctttaccgttactgtgccaaaggatctttacgtcgtggaatacgggtcaaatatgactatcgaatgcaagttccccgtcgagaaacagctggacctggctgccctaatagtatattgggaaatggaagataagaatattattcagttcgtccacggagaggaagacttgaaagtccaacacagtagctacaggcagagggctagactgctcaaggatcaattatcacttggaaacgctgcgctgcagataaccgatgtgaagctccaggatgccggagtgtacaggtgcatgattagctacggaggcgcagattataaaagaatcaccgttaaggttaacgccccatacaataaaatcaatcagcgcattcttgtggtggatccagtgacaagcgaacacgagctcacctgtcaggccgagggatatccaaaggctgaggtgatctggactagcagcgatcaccaggttctgagcggtaaaacaaccaccacaaattcaaaacgcgaggaaaaactttttaacgtgactagcacattgcggattaatacgaccaccaacgagatattttattgcacatttagacggctcgatcccgaggaaaatcatactgctgagcttgtcatcccagagctgcccctcgctcacccgcctaacgaacgaacgcatctggtcatcctgggtgctattctgctctgcctcggtgtggcactcaccttcattttcagattaaggaagggtaggatgatggatgttaaaaagtgtggcatccaggacacaaacagcaagaaacaatcagacacccacttggaggaaacctag

SEQ ID NO: 378 - DNA, 612 bp, Artificial Sequence
  Description of Artificial Sequence: Synthetic Transcript Sequence
atggtgaggctgcctctgcagtgtgtgctgtggggttgtctgctgaccgccgtacaccccgagcccccaacagcctgtagagaaaagcagtacctgattaactcccagtgctgttccctgtgtcaaccaggacaaaagttggtgtctgactgtacggagttcactgaaacagaatgcctcccctgcggggagagtgaattcttggacacctggaaccgtgagacacattgccaccagcacaaatactgcgaccccaacctcggccttcgggtacagcagaagggaacatcagagacagacacaatctgcacttgtgaggagggatggcattgtaccagcgaagcgtgtgagagctgtgttctccaccgatcatgctcccctgggtttggagtgaagcagattgccactggagtttctgacactatctgcgagccatgccctgtcggcttcttttcaaacgtttcctctgcattcgaaaaatgtcacccgtggacacggtcacctggatccgctgaatcccctggaggagaccctcatcaccttcgagatcctgtgtgtcaccctctcggggcaggactctaccagaagggaggtcaggaggccaaccagtag

SEQ ID NO: 379 - DNA, 786 bp, Artificial Sequence
  Description of Artificial Sequence: Synthetic Transcript Sequence
ggaaggagtcccctccggacacgggatagagtcttgaccaactgggaggatggactgaccgtcgcttatggtgcagtgaagctgatccaatcactgtccctccagcctgttggctggcagcagaactggggcctcagcagtcccccaacaatgttgcttccttcacgcgctcagtcacctactgagttgccccttgctccgttggcagagccaaacacagggtgttcatctctgttatcctggcacagcaccagaggcgagttgcacctgtgggctctggggcttggacagatgggtggtagcaagtgtggtagtcccctgtcacctttggcccctaccctggaagcgctgcgcagaccatggtgcgggcagcaaggcgctgggggaactcggggtatttcgaccgaccccccaagcggaaaaggcggacgcgcatggggacgggaccccctacccagggaggggctactaaggggcaccgctgcccctgccgctggaggtgatctgaccccctgcctgagcagacctcctacacctagtcgcaatccgcgaagaagtatcttccccaccatcttcctggctcctacgctcctactgcagtgccgcagactctacatggacgcaaaccgctcccctcgcagaatggccaagcgggttgcatcacagtgccgcagagacagtgaggccgctcctacacaagaatgcggacacgttgggaagcaggccgtgggtcagagagcttggtgctgttgctgctgcggcgtcagagtcaggggatggcactag

SEQ ID NO: 380 - DNA, 834 bp, Artificial Sequence
  Description of Artificial Sequence: Synthetic Transcript Sequence
atggtacgattacctcttcaatgcgtcctatggggctgcctgttgacagcagtgcatcccgagccgccaactgcctgcagagagaagcaatacctgatcaattctcagtgctgctctctgtgccagccagggcagaaattggtcagtgattgcacagaattcacagagacggaatgccttccctgtggggagtccgaattcctggatacatggaatcgggagactcactgtcaccagcataagtattgcgacccaaatctgggtttacgagtccagcagaaagggacaagcgaaaccgatacaatttgcacgtgcgaggaggggtggcactgcacttccgaggcttgcgagtcatgcgttttgcaccgcagctgctcccctggctttggtgtcaaacagattgcaaccggggtttctgacacaatttgcgaaccatgcccagtaggctttttctcgaacgtctcaagcgcttttgagaaatgtcacccttggacctcttgtgaaacaaaggacctggtcgtacagcaggccggtaccaacaagacagatgtggtgtgcggccctcaggacagactccgtgccttagtggtcattcctatcatcttcggcatcttgtttgccatcctgctggtcctggtgttcataaagaaggtggcaaaaaagccgaccaataaggcccctcaccccaagcaggaaccacaggaaataaactttccagacgacctcccaggaagtaataccgcggcacccgtccaggaaactttgcacgggtgccaacccgtgacccaggaggacgggaaagaaagccgcatcagcgtccaggaacgacaatag

SEQ ID NO: 381 - DNA, 723 bp, Artificial Sequence
  Description of Artificial Sequence: Synthetic Transcript Sequence
atgatcgagacgtataaccagacatctccacgttcagcagccactggcctacctatctccatgaaaatattcatgtatctcctgacagtcttcctgataactcagatgatcggctcagccctattcgcagtgtatttacaccgtcgtctcgacaagatcgaggacgaacggaatcttcatgaggattttgtgttcatgaagacaattcagcgctgtaatactggagaaaggtccctgtccctgctgaactgcgaggagattaagagtcaattcgaaggttttgtgaaggacatcatgcttaacaaagaagagacaaagaaagaaaattccttcgagatgcaaaaggtgctccagtgggctgagaagggctactacacaatgtccaacaacttggtcacattagagaacggcaagcaattgacagtcaagagacaggggctctactacatttacgcacaggtcaccttttgcagcaaccgtgaagcctcttctcaagctcccttcattgcatccctatgcctgaaatctccgggacggtttgaacgaatcctgttgagggccgcaaatacccactctagcgccaaaccatgcggccagcaaagcatccatctgggcggtgtgtttgaactgcagcctggggcaagtgtttttgtgaatgtcacagaccctagtcaggtgagtcacgggacaggcttcacttcatttggtctgctgaagctctag

SEQ ID NO: 382 - DNA, 786 bp, Artificial Sequence
  Description of Artificial Sequence: Synthetic Transcript Sequence
atgattgagacgtacaatcagacaagcccccgaagcgcagcgaccggacttcccataagtatgaaaatctttatgtatctgctgaccgtgtttcttatcacccaaatgataggctccgctctatttgccgtgtatctccatcgcaggctagataaaatcgaagatgagcgaaacctgcatgaggactttgtgttcatgaagactattcagaggtgtaacacaggtgagcgttcgctttctctgctgaattgtgaagaaatcaagtcccagtttgagggcttcgtcaaggatataatgctgaacaaagaggagaccaagaaggagaacagcttcgaaatgcaaaagggagaccagaacccacaaatcgcagctcacgtcatatcagaggcctcatcaaaaacaacatcggttctgcaatgggctgaaaagggctattataccatgtctaacaatttggtgaccttggaaaatggtaaacagctcaccgtgaagcggcagggcctttactacatatacgctcaggtgactttttgctctaatcgggaagccagcagtcaggcaccattcattgcttcgctctgcctgaaaagcccagggagatttgaacgcattttactgcgcgctgcaaacacccactctagcgctaagccatgtggccaacagtccatacacttaggcggagtattcgaattacagcctggcgctagtgtcttcgttaatgtaacagatccatcccaagtgagtcacggcaccggcttcacctcttttggtctgttgaagctgtag

SEQ ID NO: 383 - DNA, 5169 bp, Artificial Sequence
  Description of Artificial Sequence: Synthetic Transcript Sequence
atgaggactggttgggcaacccctagacgcccagctggattactgatgctactgttctggttttttgacttagcagaaccctccggccgagccgctaacgacccattcactattgtgcacggaaacacaggtaaatgcattaagccagtgtatggctggatagtggcagacgactgtgacgagacagaagacaagttatggaagtgggtctcacagcacaggctctttcatctgcactcccagaaatgcctggggcttgacattaccaagagcgtgaacgagctgcgaatgttctcctgcgatagctctgctatgctgtggtggaagtgcgagcaccatagcctgtacggcgctgctcgatataggcttgccctgaaagatggacacggcactgctatcagtaacgccagtgacgtgtggaagaagggagggtctgaggaaagtctgtgtgatcagccctaccatgaaatctacaccagggacggcaactcctatggcagaccatgcgagttcccgttcctcattgacggtacctggcatcacgattgtattctcgatgaggaccattcgggcccatggtgcgcaactacccttaactacgagtacgaccgtaagtggggtatctgcctcaaaccagaaaatggctgtgaggataactgggagaaaaacgaacagtttggaagctgttatcagttcaacactcagaccgcactctcctggaaagaggcctatgtcagctgccagaaccagggcgcagacctgcttagtataaactcagctgcagagcttacatatctcaaggaaaaggaaggcatcgccaaaatattttggataggcctcaatcagctgtactccgctcgcggttgggagtggtcggaccacaaaccactcaatttcctgaattgggaccccgaccgtccatcggccccaaccattggcggatcgtcttgtgctcggatggatgcagaatctggtctgtggcagagctttagttgcgaggcacaactgccgtatgtgtgcagaaagcctttaaacaacaccgtggagcttacagacgtgtggacctattctgacacaagatgtgatgccggatggttgcccaataatgggttctgttacctcctcgttaacgagagtaatagttgggacaaagcacatgctaagtgcaaggccttcagcagcgaccttataagcattcattcccttgcagatgtggaggtggttgtgaccaaacttcacaacgaggatatcaaggaggaggtgtggattggattaaaaaacatcaacattcccacactcttccagtggagcgatggaactgaggtcacgttaacctactgggacgagaacgaaccgaatgtaccatacaacaagacccctaactgtgtcagctatcttggtgaattgggtcagtggaaagtccagagctgcgaagaaaaactaaagtatgtgtgcaaaagaaaaggggaaaagctcaacgatgctagtagtgataagatgtgtccgcctgatgagggttggaagaggcacggtgaaacctgctacaagatttacgaagatgaggtgccatttgggaccaactgcaaccttaccattaccagtaggtttgaacaggaatacttgaatgacttgatgaagaagtatgataaaagccttcgtaagtacttttggaccggattaagagatgtggacagttgtggagagtacaactgggccaccgtggggggtcgacggcgtgcggtcacttttagtaactggaatttcctggagcctgcaagcccgggtggatgcgtggctatgtctaccggaaagtctgttggtaagtgggaggtcaaagattgccggagcttcaaggcgctcagtatttgcaaaaagatgagtggtccattggggccagaagaggcgtcacctaaacccgacgacccatgtcccgaaggatggcaaagcttccctgcttctctgagctgttataaggtcttccacgcagaacgcatagtgaggaaaaggaactgggaggaagcggaacggttctgtcaggcactaggagcacatctttcttccttctcacacgttgacgagatcaaagagttcctccatttcctcactgaccagttctccggacagcactggctgtggatcgggctgaataagagatctcccgacctgcaggggtcctggcaatggtctgatcgcacgcctgttagtacgattatcatgcccaatgagtttcaacaggactacgatatccgggactgcgccgctgttaaggtctttcatcgcccatggcgccgtgggtggcatttttacgacgacagggagttcatctatctgcgtcctttcgcatgcgacacaaaacttgaatgggtttgccagatccccaagggcaggacgccgaagacacctgactggtacaaccctgatcgggctggaattcatggacctccccttatcatcgaagggtcagaatattggttcgtggcggatctgcatctgaattacgaggaggcagttctatactgtgctagtaatcactcttttctggctaccattacctcatttgtgggtttgaaagctatcaaaaataagatcgccaatatatcaggagacggacagaaatggtggattcgtataagtgaatggccgatcgacgatcacttcacgtatagccggtacccttggcacaggtttcccgtgacatttggcgaggagtgcctatacatgtcggcaaaaacatggctcatagatctcgggaaacccaccgattgttctaccaaacttccgtttatttgcgagaaatataacgtatcatctttagagaagtattcaccagattctgccgctaaggtacagtgctccgagcagtggatccctttccagaacaaatgctttctgaagattaagccagtcagtttgactttcagccaggcttccgatacttgccactcctatggaggcaccctgcccagcgtcctttctcagattgaacaggacttcatcactagcctgcttccagatatggaggccactctttggataggtttgagatggacagcatacgaaaagataaacaaatggactgataaccgggaactcacatactccaattttcatcccttattggtatcagggaggcttcgaatcccagaaaacttcttcgaagaagagagccgctaccactgcgccctaatactaaacctccagaagagccctttcacaggcacctggaatttcacatcttgtagcgagcgccactttgtctctctttgccagaagtattcagaggtgaagtcgcgccagacgttacagaacgcatccgaaaccgttaaatatttaaacaacctttacaagatcatcccaaaaaccctgacatggcactctgccaaaagagaatgtctgaagtctaatatgcagctggttagtatcacagatccttaccagcaggcttttctgagtgttcaggccctgctccataatagctccttgtggattggtctgttcagtcaggacgatgaactgaatttcggctggtcagatggaaagcggctgcacttttcaaggtgggcagagacaaatgggcagctggaggattgtgttgtgctggacaccgacggcttttggaagacagtggactgcaacgacaatcaacccggagccatctgttattattccggaaacgagacggagaaggaagtcaagccggtcgatagcgttaaatgtccttcgcctgtactgaacaccccttggattccgtttcagaactgctgttataatttcattattacaaaaaatcgccacatggctaccactcaagacgaagtccacaccaagtgccagaagttaaaccctaagtcgcatattctgagtattcgcgacgagaaagagaacaatttcgtcctcgaacagctgctgtattttaactacatggccagctgggtgatgctcggaatcacatatagaaacaagtccctaatgtggtttgataagactccactaagttacacacactggcgtgccggtcgacccacaatcaagaacgagaaatttctggcgggtctgtcgacagacggcttttgggacatccaaacgtttaaagtaatagaggaggccgtgtacttccaccagcattcaatcctagcctgcaagatagagatggtcgactataaggaagagtataacactactctcccgcagtttatgccttatgaggacggcatttatagtgtcatacagaagaaagttacctggtacgaggctctcaacatgtgcagccaaagcggagggcatttagcctctgtacacaatcagaatggtcagctttttctcgaagatatcgtgaagagggacgggtttccgctgtgggtaggactctcctctcacgatggctctgagtcgagttttgaatggtctgatggatccactttcgactacataccttggaagggccagacttcacccggaaattgtgtgctgctggaccccaagggcacttggaagcatgagaagtgcaacagcgtgaaggatggggctatatgttacaagccaaccaagagtaagaagttgtccaggctgacttattcaagtcggtgccccgcagctaaagaaaacggctccaggtggatccagtataagggacactgttataaaagtgaccaggcattgcattctttctcggaggcaaaaaaactgtgcagcaagcatgatcactcagcgactatagtgtcgattaaggacgaggacgaaaacaagttcgtatcacgcctcatgagagagaacaataatatcaccatgcgggtctggctcggattgagccagcatagcgttgatcagagctggtcctggctggacggcagcgaggtaactttcgtcaagtgggagaacaaatccaaatctggggtcgggaggtgttctatgctgattgcttctaacgagacgtggaaaaaggtcgagtgtgagcacggttttggtcgagtggtgtgtaaagtgcccctcggcccagactacactgctatagcaattattgtggcaactctgagcattcttgtgctgatggggggactgatctggtttctgtttcaaaggcaccgcttgcacttggccggttttagcagcgtgcgttatgcccagggagtgaacgaggacgaaatcatgctcccttcatttcacgactac

SEQ ID NO: 384 - DNA, 5453 bp, Artificial Sequence
  Description of Artificial Sequence: Synthetic Transcript Sequence
atgcgcaccggatgggccactcctcgaaggcctgccggtctgctgatgctacttttttggttcttcgacttagccgagcccagtggcagggccgctaacgatccatttactatcgtacacggaaacacaggcaaatgcatcaagccagtatacggctggatagtggccgacgattgcgatgaaaccgaggataagctgtggaaatgggtgagccagcatcgcctgtttcacctccacagtcagaagtgtctcgggctggatattacgaagagcgtaaacgagttacgcatgttttcttgtgatagtagcgccatgctgtggtggaagtgtgagcaccattctctctacggagccgctcgatatcgactcgccttaaaagacgggcacggtactgccatctctaatgcgagcgacgtgtggaaaaaagggggatccgaggaatcactgtgcgatcagccctaccatgaaatttacacgagggacggcaactcttatggcaggccatgtgagttcccctttttgatagacggcacctggcaccatgactgcatacttgacgaagaccattcaggtccatggtgcgctacaacactgaactatgagtatgatcgcaagtggggcatatgccttaagccggagaacggctgtgaagacaactgggagaagaacgagcaatttggtagctgctaccagtttaacacacaaaccgcactgagctggaaggaggcatatgtgtcatgccagaatcagggcgctgatctgctaagtattaactctgcagccgagctcacttatctgaaggagaaagaggggatcgccaagattttctggataggcctgaatcagctgtattctgccagaggatgggaatggagtgaccataaacccttgaattttctgaattgggatccagacaggccatccgcgcctacaatcggaggcagcagctgtgccaggatggacgcagagtcggggctgtggcagagcttcagctgtgaagctcaattgccgtatgtctgtcggaaacctctaaacaataccgtcgaactaacagatgtgtggacttactctgacacccgatgtgatgccggatggctgcctaacaatggcttctgttatctgctagtgaatgaatcaaattcatgggacaaagcccatgccaaatgtaaggctttctcgtcagatctcataagcatccattcgcttgcagacgttgaagtggtggtgacgaagctacataacgaagatatcaaagaggaagtatggatcgggctcaaaaacatcaatattcctacgctgtttcagtggtctgatggtaccgaagttactttaacatattgggacgagaacgagccaaacgtcccttacaataaaacccctaactgcgttagctaccttggggagctcggccagtggaaggttcagtcttgcgaagagaagctgaagtatgtgtgcaaaagaaagggggagaagctcaacgatgcatcctccgacaaaatgtgtccacctgacgagggctggaagagacacggcgaaacctgttataaaatctacgaagacgaggtccccttcggcacgaactgtaacctgaccatcacgtctaggttcgagcaggaatatctaaatgatttgatgaaaaagtatgacaaaagcttgaggaagtatttttggactggccttcgtgatgttgatagctgcggggaatataattgggcaaccgtgggaggacgtaggagagcagtgacattttcaaattggaacttcctggagccggctagccctggaggctgcgtagccatgagtacaggaaaaagcgtggggaagtgggaagttaaagattgtagatcctttaaagccctttccatctgcaagaaaatgtctggcccactaggccctgaggaggctagcccgaagccagacgacccttgccccgagggatggcaaagtttcccggcttctctcagctgttacaaagtgtttcacgccgagcgaatcgttagaaaaagaaattgggaggaggctgagcgtttttgtcaagcgttgggcgcacatctgtcttccttttctcatgttgacgaaattaaggagtttcttcatttcttgactgaccagttcagcggccagcactggctgtggattggcctgaataaaaggtctccggaccttcagggtagttggcagtggagcgataggacacctgtgtcaaccattatcatgccgaacgaatttcagcaggattacgatatcagggattgtgccgcagtgaaggttttccaccggccatggagacgagggtggcacttctatgacgatcgggagtttatctatctacggccattcgcatgtgacacgaagctggagtgggtgtgccagatccccaaggggagaaccccgaagactcccgattggtacaatccagatagggctgggatccatgggcctcctctgatcatagaaggctctgaatactggtttgtggctgacctacacctaaactacgaggaggcggtcttatattgtgcctcaaatcattcttttctggcaaccatcacctcttttgttggattaaaggcaattaaaaacaagattgccaatattagtggggatggtcaaaaatggtggatccgcattagtgaatggccgatcgatgaccactttacctactctcggtacccttggcacaggttcccagtaacctttggtgaggaatgcctctacatgtccgctaagacgtggcttatagaccttgggaagccaactgattgttcaactaagctcccctttatctgcgagaaatacaatgtttcgagcctggaaaagtattcgccagattccgcggcaaaggtacagtgcagcgaacaatggatccctttccaaaataagtgcttccttaaaataaagcccgtttccctgacctttagccaggcatctgatacctgtcattcctatggtggaacgctgccctctgtgctcagtcaaatcgagcaggactttattactagcctgctgcccgatatggaggcaactctatggatcggcctcagatggacggcctacgaaaaaatcaacaagtggacagacaatcgtgaactgacctactccaactttcatccgctgcttgtgtccggcagactgagaatacctgaaaatttctttgaggaggaatctagataccactgcgccctgatcctgaacctgcagaagagcccatttaccgggacttggaacttcacaagctgctcagaacgccactttgtttccctgtgtcaaaaatacagtgaggtgaaatctcgccagacattacagaacgcgagtgaaacggttaagtatctgaacaatctctacaaaatcattcccaaaacactgacatggcattccgctaagagagaatgcttgaagtctaacatgcagttggtgtcgattacggacccttaccagcaggcctttctgtcagtgcaggccctcttacacaatagtagcctgtggataggtcttttcagccaggacgacgagctgaatttcggttggtctgacggtaaacgtctgcacttcagcagatgggccgagacgaacggccaacttgaggattgtgtagtactcgatacagacggattttggaaaaccgtagactgtaatgataatcagcccggagctatctgttactacagcggtaatgaaacggagaaggaggtgaaaccagtggactccgtgaaatgtcccagccccgtgctgaacactccctggataccattccagaattgctgctacaactttattattacaaagaaccgccatatggccactacccaggacgaagttcacactaagtgccagaaactgaacccaaaaagtcatattctatctatacgtgacgaaaaggaaaataacttcgttctcgaacaactcctgtactttaattacatggcatcatgggtgatgctgggaatcacctatcgcaataagtctctgatgtggttcgacaagacgccccttagttacacccactggcgtgcgggaaggcccacaatcaagaacgagaagtttttagccggactgtccactgacggtttttgggacattcagaccttcaaggtgattgaagaagccgtttactttcaccaacattccattctggcctgtaagatcgagatggtggactataaagaggagtataacacaaccctaccacagttcatgccatatgaagacggtatatactctgtaatccagaagaaggttacctggtacgaggctctgaatatgtgctcacagtcaggagggcacttagcgtccgtgcacaatcagaacgggcagctcttcctggaagatatcgtgaagcgggacggatttcccctgtgggttgggctgtccagccacgacggatcggagagttcttttgaatggtcagatggatcaaccttcgactatattccctggaagggacagacctcccctggaaactgtgtgctcctcgaccccaagggcacctggaagcatgagaagtgtaactccgtcaaggatggagctatttgctacaagcctaccaagtccaaaaaactgtcacgcctgacatattcctcgagatgtccagcagctaaagaaaatgggtctaggtggattcaatacaaagggcactgttataaatctgatcaggcgctgcactcattttccgaagccaagaagttgtgcagtaagcacgaccactcagcaactatcgtgtctattaaggacgaagatgaaaataaatttgtctcaagattgatgcgagagaacaataatattaccatgcgcgtgtggctcggccttagtcaacactcggtagattgcccgtcctctacatggatacaattccaggacagctgctacatcttcctccaggaagctataaaggttgagagcatcgaggatgtcaggaaccaatgcacagaccatggagctgatatgatctccattcataatgaggaggaaaacgcttttatactcgacactttgaagaaacagtggaaaggcccagatgacattctgctaggcatgttttacgacacagacgacgcatcatttaagtggttcgataattctaacatgacctttgacaagtggacagatcaggacgacgacgaggacttggtggatacctgtgcatttcttcatatcaaaacaggcgaatggaaaaaaggaaattgtgaagtctctagtgtggaagggacactatgtaagactgccattccatataaacgtaaatatctttctgataaccacatcctgatttccgctctcgtgattgccagtacagtgatcctgactgtgctaggagccataatttggttcctgtacaagaagcactcggactcccggtttacaacagtcttttctacagcacctcaatccccatataacgaagattgcgttctcgtggtgggcgaggaaaacgaatatcccgtgcagtttgacta

SEQ ID NO: 385 - DNA, 5621 bp, Artificial Sequence
  Description of Artificial Sequence: Synthetic Transcript Sequence
atgcgcaccggatgggctacaccaagaagaccagccggtttactgatgctgctcttctggttctttgatttggccgaaccctctggcagagccgctaacgatcccttcacaatcgtgcatggcaatacaggcaaatgtatcaaacctgtttatggttggatcgttgcagacgattgtgacgagacagaagacaaattatggaagtgggtgagccagcaccgactattccatctacactcccagaaatgcctgggacttgatataacaaagtcagtcaatgaactgcggatgttttcctgcgatagctcggctatgctgtggtggaaatgtgagcaccacagcctgtatggtgcggctcgttatagactcgccctgaaggacggccatgggactgctatatccaatgcttccgatgtatggaaaaaaggcggtagcgaggagtcactgtgtgaccagccctaccacgaaatttacactagagacggcaactcttacggcaggccatgcgagtttccattcctgattgacgggacttggcaccatgactgtattctagacgaggatcatagtggcccatggtgtgcgacaactcttaattacgagtacgaccggaaatggggtatatgtctcaaacctgaaaatggttgtgaagataattgggagaaaaacgagcagttcgggagttgctaccaattcaacactcagacagcacttagttggaaggaagcctatgtgtcttgtcagaatcagggggctgacttgcttagcattaactccgccgctgagcttacatacctgaaggagaaggagggaattgccaagattttctggattggcctgaatcagctgtatagcgctcgcggttgggagtggagcgatcacaagcccctgaacttccttaattgggatccagaccgtccttctgctcctacgattggagggtcctcttgcgctcgaatggatgccgaaagcgggctctggcagtcctttagctgtgaagcccagctaccgtacgtctgcaggaagcccctgaataatacagtagagttgaccgacgtctggacatatagcgatacccggtgcgatgctggctggctgcctaataacgggttctgctatcttctggtaaacgagtcaaatagctgggacaaagcccacgcgaagtgtaaggctttttcctcagatctgatcagcattcacagtctggcagacgttgaggtggtcgttacaaaactgcacaacgaagacatcaaagaagaggtgtggattggtttgaagaatatcaatatccctacgcttttccagtggagcgacgggacagaagtgactttgacttactgggatgagaatgaacctaacgtgccttacaataagacacctaattgcgtgagctatctcggagagctggggcaatggaaggtgcagtcctgcgaggagaagcttaaatacgtgtgcaaacgtaaaggcgagaaattaaacgatgccagttcagacaagatgtgcccacctgacgaaggctggaaacgtcatggcgagacatgttacaaaatctacgaggacgaggtaccattcggaacgaactgtaatctcacgattacatcccgctttgagcaggaatacctgaatgatctgatgaagaagtatgacaagtctcttcgcaaatacttctggactgggctcagagacgttgacagctgtggcgaatataattgggccactgtgggcggaagacgacgagccgttacattcagcaattggaactttctggagccggcatcccccggagggtgtgtcgctatgtcgactggtaagtcagtgggcaagtgggaggtaaaggattgccgatcgtttaaggccctgtcaatttgcaaaaaaatgtccggcccactggggccagaggaagcaagccctaagcctgacgacccatgtccagaaggatggcaatcgttcccggcatctctctcatgctacaaggtgttccacgccgagagaatcgttcgaaagaggaactgggaggaggctgaaagattctgccaggctttgggtgcgcacttgtcctcattttcgcatgtggatgaaattaaagaattcctccacttcctgactgaccagtttagtgggcagcactggttgtggattgggttgaataagcggtcccctgatttacagggctcctggcagtggagcgataggacgcccgtgagcaccattattatgcccaatgagttccagcaagattatgacatacgcgattgcgctgccgtcaaggtctttcatcgaccttggcgacggggatggcacttctacgatgaccgggaattcatctatctgcgacctttcgcctgtgacaccaagcttgaatgggtctgccagatcccaaaaggcagaacccctaagactcctgactggtataatcccgaccgggcaggcattcacggccctccgctaatcattgagggaagcgagtattggtttgtcgccgatctgcatctgaactatgaagaggcagtcttgtattgcgccagtaatcattcttttctggcaacaattacgagctttgttggattgaaggcgataaaaaacaagatcgctaatatatctggggacggccagaaatggtggataagaatttctgaatggccaattgacgatcacttcacctattcaaggtacccatggcatcggttcccagtgacttttggagaggagtgtctgtatatgtcagcaaagacgtggttaatcgacctgggtaaaccaacagactgcagtacaaaactgccctttatttgcgagaaatacaatgtctcgagcctggaaaagtacagtccagacagcgccgctaaagtccagtgctccgaacagtggatcccatttcagaacaaatgctttctgaagatcaaacctgtcagtctgacatttagccaggcttcagacacatgccactcctacggtggaactctgcccagtgtcctcagtcagatcgaacaagatttcatcacgtccttactccctgacatggaggctacactctggatcggactcagatggacagcttacgagaagatcaacaagtggaccgacaatcgagaactcacctactctaactttcatcctctcctcgtctcaggtcgactcagaatacctgagaatttttttgaggaagagagtaggtatcactgcgccctgatacttaacttacaaaaaagccctttcacagggacgtggaacttcactagttgcagtgaacggcattttgtgagcctgtgccagaagtacagcgaggtcaaatcacgtcagacattgcagaacgcatccgaaaccgtgaagtatctaaacaatctttataagattatccctaagactctgacctggcactccgcaaagcgagaatgtttgaaatccaacatgcaactcgtttctatcacagatccttatcaacaggcttttctttcagtgcaggccctgctccacaactccagcctgtggatcggcttattttcccaggacgacgaactgaatttcggctggtctgacgggaagcgtcttcatttctctagatgggccgagacaaatggtcagctggaggactgcgtggtgctcgatacagatggattttggaagaccgtcgactgtaatgataaccagcctggagctatttgctactatagcggaaatgaaacagaaaaagaagtgaaaccggtcgattcagtaaagtgtccctccccagtccttaacacaccatggatacccttccaaaactgctgttataactttatcatcacgaagaatcgacatatggccacaactcaggacgaggtccatacaaagtgtcagaagttgaaccccaagtctcacatcctctccatacgtgacgagaaagaaaacaatttcgtgctcgaacagctattatactttaactatatggcgagttgggtgatgctgggaataacataccggaataagagtctgatgtggtttgataagactccactgtcctacacccactggcgagcaggacggccaactataaaaaatgagaaattcctggctggacttagtacggacgggttttgggatatccagacgtttaaggtgatcgaagaggcggtgtacttccatcagcactccatcctcgcctgtaaaatcgaaatggtagactacaaagaagagtacaacacaacccttccccagtttatgccctatgaggacggcatatactcagtgatacagaaaaaagtcacgtggtacgaagccctgaacatgtgtagccaaagcgggggacatttggcttccgtgcacaatcaaaacgggcaattgtttcttgaagacattgtcaaaagggacggattccctctgtgggtggggctctcctctcacgacggttccgaaagtagtttcgaatggtctgatggctcaactttcgattatatcccttggaaaggccagacttctcctggtaactgcgttctgttggaccccaaagggacctggaaacatgaaaagtgtaattctgtcaaagacggggcaatctgttacaagcccactaagtctaaaaagctctccaggctcacctacagtagccggtgcccagcagctaaagaaaatgggtcgaggtggatccagtacaaggggcattgttacaagagtgatcaggcgctgcatagtttttctgaggccaaaaagttgtgttccaaacatgaccatagcgctacaattgtgagcatcaaggacgaggacgagaacaaatttgtgagtcgcttaatgcgggagaacaacaacatcactatgagagtgtggttgggactgtcccagcattccgtggaccaaagttggagttggcttgatggctccgaggtaaccttcgttaagtgggagaacaagagtaaaagtggcgtcgggaggtgctcaatgctgatcgccagtaatgagacatggaaaaaagtggaatgtgagcacgggttcggccgtgttgtttgtaaggtgcctctagactgccccagcagtacctggatccagtttcaggacagttgttatattttccttcaggaggctatcaaggtcgagtctatcgaagatgtcaggaatcagtgcacagatcacggggcagatatgatctccatccataacgaggaagagaacgctttcatcttggacaccctaaagaagcaatggaagggtccagatgacatactgctaggcatgttttatgacaccgatgatgcttcattcaaatggtttgataatagtaacatgacatttgataagtggacagatcaagacgatgacgaggatctggtggacacctgtgcattcctccatattaaaacaggagaatggaaaaaggggaactgcgaggtgtctagcgtagagggcactctgtgcaagactgcgatcccttacaagcggaaatatctctcagacaatcacatccttatttccgccttagtgatcgccagcactgtgattctcacagtactgggtgcaatcatatggttcctttataagaagcattctgactcacggttcaccaccgtgttctcaacagctcctcagtccccttacaatgaggactgtgtgctagtggttggagaggagaacgagtaccctgttcagttcgatta

SEQ ID NO: 386 - DNA, 186 bp, Artificial Sequence
  Description of Artificial Sequence: Synthetic Transcript Sequence
atgaaaaggttcctttttctgctcctgacaatttctcttctggtgatggtccaaatccagaccggcttatcagggcagaatgacacctcccagacctcctcaccctctgcttcaagcaatatcagcggtggtatcttcctctttttcgtggctaacgccatcatccacttattttgtttctcttag

SEQ ID NO: 387 - DNA, 1062 bp, Artificial Sequence
  Description of Artificial Sequence: Synthetic Transcript Sequence
atggagttgaccgaactgctgttagtcgtgatgctgctgttgacagctcggctgacattgagctctccagcaccccctgcttgcgaccttcgcgtgctgtctaaactgctacgggatagtcatgttttgcactctcgcctgagccaatgtcctgaggtccatcccctgccaaccccagtcctgctccccgctgtcgatttttccctgggtgagtggaaaacccagatggaggagactaaggcgcaggatatcctcggtgccgtaacccttctacttgaaggggttatggccgcaaggggacagctcggcccaacttgtctgtcttctctgttaggacaattgagtggacaggtgagactgctactgggcgctctgcagtcattgcttgggacccagttgccgccacagggccgaaccaccgcccataaggaccctaacgccatttttctgtcttttcagcacctactcagaggcaaggtcaggtttttgatgctggtcgggggtagcaccctgtgcgtgcgcagagcacctccgactacagcggtgccctcccggacttccctggtgctcacactgaacgaactaccaaatagaacctcgggcctccttgaaacaaacttcacggccagcgcacgaaccactggctccggattattgaagtggcaacagggattcagagcaaaaatacctgggctgctgaaccagacgagtaggtccctggaccagatacctgggtatctgaaccgcatccacgagctattgaatggcacacggggtctctttcccggacctagccgcaggacgttgggagcccctgatatatcctctggcacatcagatacaggctccttgccacctaacctacagccgggttattccccgtcacccactcaccctcctaccggccagtacaccttgttccccttaccacccactctcccaacaccagtggtccaattacaccctctcctcccagacccatcagcccctacccccacaccgacttctcctctgctcaacacctcttacacccattctcaaaacctctctcaggagggctag

SEQ ID NO: 388 - DNA, 537 bp, Artificial Sequence
  Description of Artificial Sequence: Synthetic Transcript Sequence
atgaccgtgcttgctcccgcatggtctccaaccacttatctgctgctgcttctgcttctttcgagcggcctcagcggtacacaggattgctcttttcagcacagccctatatcaagcgacttcgcagtgaaaattcgggagttaagtgactaccttctgcaggactaccccgtcaccgttgcctcgaacctccaagatgaggaattgtgcggaggactctggcgtctggttctggcacagcgctggatggagaggctaaagaccgtcgccggttccaaaatgcaagggctgttagaaagggtgaacactgagatccacttcgtgactaagtgtgctttccaacccccaccttcttgtctcaggttcgtccaaacaaatatttcccgtctcctgcaggaaacctctgaacaattagtggcccttaaaccatggattactcgtcaaaacttctccagatgcctggagttgcaatgccaacctgttgaaacggtcttccatcgcgtaagccaggacgggctggatctgttgacttcctag

SEQ ID NO: 389 - DNA, 708 bp, Artificial Sequence
  Description of Artificial Sequence: Synthetic Transcript Sequence
atgactgtccttgcacccgcttggtcaccgaccacttatctgctgcttctgctactgctgtcctctgggttatctggcacacaggactgttcttttcagcactccccaatcagcagtgactttgcagtaaaaatccgggaactttctgattaccttctccaagactatcctgttacagtcgcgagcaatttacaggatgaagagctgtgcgggggtctgtggcggctcgttctggctcagaggtggatggagcggcttaaaacagtggctggcagcaagatgcagggcctcctggaacgggtgaacacagagatccattttgttaccaagtgtgcctttcagcctccccctagttgcctcaggttcgtgcaaactaacattagtcgcctgctgcaggagacgagtgaacagctcgtggctctgaaaccgtggatcaccagacagaatttcagccgctgcctcgagttacagtgccagcccgactctagtactctgcctccaccgtggtcacccaggcccctggaggcaacggcccctactgctcctcaaccacctctactgctgctactcctcctgcctgtcgggctgttgttactggccgctgcttggtgcttacattggcagaggacccgcagacgcacccctcgccctggggaacaggtgccgccagtccccagcccccaggacctgctgctggttgagcattag

SEQ ID NO: 390 - DNA, 1110 bp, Artificial Sequence
  Description of Artificial Sequence: Synthetic Transcript Sequence
atggtttgggcaccactcggacctccacggacagactgcttgaccctgctccatactccaagcaaggattcccccaaaatgagcttggaatggctcgtcgcttggtcctggtctctcgacggactccgcgactgcatcgctacagggatccagtcagtcagagactgcgataccacagcagttatcacagtcgcctgccttctggtcctctttgtgtggtattgttaccacgtgggcagggaacagccgagaccttacgtctctgtgaacagtctcatgcaggctgctgacgcaaacggcctacagaatggctacgtctactgtcagtcgcccgagtgcgtgcgatgtactcacaatgagggactgaaccaaaagttgtaccacaacttgcaagagtacgccaagaggtactcctggtccggcatgggcaggatccacaagggcattcgggaacaggggagatacctgaattctcgcccatccatccagaaacccgaggttttctttctgcctgacctgcctaccacaccatatttttcccgggacgcccagaaacacgatgtcgaggtactggagcgcaactttcagaccatcctgtgcgagttcgagaccctctacaaagcattctccaattgtagtctccctcaggggtggaaaatgaattctacaccctcgggcgagtggtttacattttatttagttaaccagggggtctgcgttccacggaactgtagaaaatgtccacgcacgtaccgactgcttggctcgctgcgcacttgtatcgggaataatgtgtttgggaatgcatgcatcagtgtccttagcccgggtacagtgatcacagagcattacggaccgacaaacatccggatccggtgtcacctggggctgaaaacaccaaacggctgcgaactagtagttggaggagaaccacaatgttgggccgaaggccgatgcctgttatttgacgattcgtttctgcacgccgcatttcacgagggctccgctgaggatgggcctcgggtggtgtttatggtggatctctggcaccccaacgtggctgctgcagaacgacaagctctcgattttatctttgcccctggtagatag

SEQ ID NO: 391 - DNA, 1989 bp, Artificial Sequence
  Description of Artificial Sequence: Synthetic Transcript Sequence
atgcgcccacaaatcttgctgttactcgccttgctaactctgggactggcagctcaacaccaggacaaagtgccctgcaaaatggtggacaaaaaggtgtcgtgccaagtgttaggcttgctacaggtgccgagcgtcttgccaccagacactgagacgctagatctcagtggcaaccagctccgctcaatactcgcttcgccactgggattctacacagctcttagacacctggacctgagcaccaatgaaatttcattcctccaaccaggggcattccaggccctcactcatctcgagcacctgagcctggctcacaacaggctggctatggcaactgccttgtccgccggaggcctaggccctctgccccgtgtaacctccctcgacctctccgggaacagcctgtacagtgggctcctcgagaggctcctgggggaagccccttccctacacactttgagtcttgccgaaaactcgctgacccgcctgacacgccacacctttagagatatgccggctctggagcagttggacctgcactctaacgtgctcatggatattgaagacggggcttttgaaggattgccgaggctgacccatctgaacttgtctcgaaatagcctcacctgtatctccgactttagtctccagcagctgcgagtgttggacctgtcttgcaacagtatcgaggcttttcaaaccgcctcccagccacaggctgagtttcaactcacctggctggacttaagagaaaataagttacttcactttcctgatctggcggctctgcctaggttgatctatctgaacttgtccaacaatctgatacgattgccaacaggacctcctcaggactctaagggtattcacgcaccatccgaaggctggtcagctctgcctctcagtgcaccaagtggcaacgccagcggtcgccctctatctcagcttcttaatttagacctgagctataacgaaatagagctgattcctgactcatttctcgagcacttaacatccctgtgctttttgaacctgtcccggaattgcctgagaacctttgaggccagaagactggggtcactaccctgtttaatgctgctggatctgtcccacaacgccctggaaactcttgagctgggtgcaagggctctgggttctctacggacgttgctcctgcagggaaacgcccttagagacttgccaccctacaccttcgcgaacctggccagtctgcagcgcctgaacctgcagggcaatagggttagcccctgtggaggccctgacgagcccggacctagcggatgcgtggctttctcaggaattacttctctgcggtccctttccctggttgacaacgaaattgagcttttaagggccggagcctttctgcacaccccattgactgagcttgatctgagttctaatcccggacttgaagttgctacgggcgctctgggcggactcgaagcgagtctggaagtcctggcactccagggaaatggcctaatggtactgcaggttgatttaccgtgtttcatctgcctcaagcgcctcaaccttgccgagaaccgcctctctcacctccccgcatggacacaggctgtttcattggaggtccttgatctgagaaacaactcctttagccttctaccgggtagcgccatgggcggacttgaaaccagcttgaggaggctctacctgcaggggaaccctctctcgtgctgtggcaatggttggctggcagcgcagctgcaccaaggtagagtcgatgtggacgccacccaagaccttatttgccggtttagttcccaagaagaggtcagtctgtcacacgtgagaccagaggattgtgaaaagggtggccttaaaaatatcaatcttatcatcatacttaccttcatattagtctcagcaatactgctaacgacactggcagcctgttgctgcgtcagacgtcagaagttcaatcagcaatataaggcttag

SEQ ID NO: 392 - DNA, 1989 bp, Artificial Sequence
  Description of Artificial Sequence: Synthetic Transcript Sequence
atgcgcccacagattctgctgttactggccctccttaccctgggcctggccgctcagcaccaagataaagtgccatgtaagatggttgacaaaaaggtgagttgccaagtgctcggactgcttcaggtaccctccgtgctgcctcctgatactgagaccctcgatctgtccggcaatcagctgaggtcaatcctagcctcacctctgggcttctacactgccctgaggcaccttgatttgtcaacaaacgagatctctttcctccaaccgggtgcctttcaggccctgacacacctcgaacacctgtcattggcccataatagactcgccatggctaccgccctgagcgctggaggacttgggccactcccccgtgtaacatctctcgacttatccgggaacagtctgtacagtggcttactggaaaggctcctgggtgaagccccatccctgcacaccctctctttggctgagaattcgctcacacggctcactagacacactttccgggatatgcccgcactggagcaactagatctccattcgaatgtactgatggacatagaagacggagccttcgaggggcttcccagactcacacatctgaacctcagccggaatagcctgacctgtattagtgatttttctttgcaacaacttagagttttggatctgagttgtaactctatcgaggctttccagacagcaagccagccccaggctgagttccaactcacctggctagatctacgggagaataaactactgcattttcccgacctggctgcactcccgagattaatttacttgaatctgtcaaacaatctcatcagattgcccacgggaccaccacaggacagtaaggggatccacgcaccttctgaaggctggtctgctctccccctgagtgcgccaagcggaaacgcctctgggaggcctctgtcccaactgctgaatctggatcttagctataacgaaatcgaacttatccctgatagcttcttggagcacctaacctccttgtgttttctaaatctctcccggaactgcctaaggacatttgaggctcgacggctgggatcactaccgtgtttaatgctcctggatctgtcccacaatgcccttgaaactttagagctcggcgctcgcgcattggggagcctaagaaccctcctcctccagggaaatgcccttcgcgatctcccaccatatactttcgccaatttggccagcctacagaggctgaacctgcagggcaaccgggtgagcccctgcgggggtcctgacgaaccaggaccaagtgggtgtgtggcctttagtggaatcactagtctcaggtctctgtcactggttgataatgagatagagttactgagagcaggcgctttcctgcacactccactgacagaactggatttgtcctccaatccgggactggaggtcgcaacaggagctcttggagggcttgaggcttcactggaagttctggcccttcagggaaatggcttaatggtgttgcaagtggacttaccgtgcttcatctgtctgaagagactgaacctggccgagaatagactgagccacctccctgcgtggactcaagctgttagcctcgaggtgctagacttgaggaataactctttctctctgttgcccggatccgcaatgggaggtctggaaacgtctttaagaagactctatctccagggcaacccactttcctgctgtggcaatgggtggctggccgctcagctacaccagggcagggttgacgtcgacgccactcaagatttgatctgtcgcttctcgagtcaagaggaagtctcccttagtcacgtccggcctgaagattgtgagaagggtggcctgaaaaacatcaatctgatcattatcctgacgttcatattagtgtctgctatccttttgaccacattggctgcttgttgttgcgtgagaaggcaaaagttcaatcagcaatacaaagcctag

SEQ ID NO: 393 - DNA, 1989 bp, Artificial Sequence
  Description of Artificial Sequence: Synthetic Transcript Sequence
atgcgccctcaaattctccttctcttggctctgctaactctcggcctagctgctcagcaccaggataaggtaccttgtaagatggtggataagaaagtgagctgtcaagtgctggggctgctgcaggtcccttccgtgctccctcccgacaccgagacgctggatctatcagggaatcagctgagatcaatcctagcatccccactgggattctacacggcactccggcacctggatctcagtacaaacgaaatctccttccttcagccaggggcttttcaagcactcacacacctggaacatctgagcctggcacataaccggctggctatggctacggctctttcagctggcggactcggcccactaccgcgagttacttctttagacttgtctggaaactccctatactctgggctgctcgaaagactcctcggagaagccccatctcttcacacactgtctcttgcagagaacagcctcacgcgtttgactaggcacacttttcgtgacatgccagcgctggaacagctggacttgcatagcaatgtactcatggatatcgaagatggggcattcgaggggctacctcggcttacccatctgaatctgagcaggaattctcttacctgtattagtgatttttctctgcagcagcttagggtgctcgatttatcctgtaactcaatcgaggccttccagactgctagtcagccacaggcagaatttcagttgacatggctcgaccttcgtgagaacaaacttctacattttcctgacctggccgcactgccaagattaatttatctcaatcttagcaataatctcatcaggctcccaactggaccccctcaagatagcaagggaatccacgcacccagtgaaggttggagcgctctgcccctcagcgccccatctggtaatgcctcaggacggcctctgagccaattgctcaatctggatctctcatacaatgagattgagctgatccccgattcttttctggaacatcttactagcctgtgttttctcaatttgtctaggaattgccttaggactttcgaggccagaagactcggttcacttccctgcctcatgctgttagacctttcacacaatgctctggagactctagaactgggggcacgggctctgggctcacttagaactctgttgctccagggtaacgccttgcgcgatctccccccatacaccttcgccaaccttgcctccctgcaaaggctgaatttgcaaggaaatagagtgtctccttgcgggggaccggacgaaccgggtcccagtggatgcgtggcatttagcgggattacgtcgctacgcagtctatctctggtggataacgagattgagctacttagggctggagcgttcctccacaccccattgactgagctggatttgagttcgaaccccggtctcgaggtggccaccggcgctctgggcggactagaagcatccctggaagtgctcgctcttcaaggaaatggactgatggttttgcaggtggacctgccttgttttatctgcctgaagcgactgaatttagccgagaacaggctgtctcacctgccagcttggacacaggcagtgagcctcgaggtcttagatctcaggaataactccttttccctgctgccagggtccgcaatggggggtttagaaactagcttacgcaggctgtatcttcaagggaatccacttagctgttgcggtaacggatggttagcagcccagctgcaccagggccgagttgacgttgatgctacacaggatttaatatgtcggttctcttctcaggaggaagtcagcttgagtcacgtccgccctgaagactgtgagaaagggggattgaagaatatcaacctaatcatcatccttactttcatcctagtgtctgccatactccttacgaccctggctgcgtgctgttgcgtgagaagacaaaaatttaatcagcagtataaggcctag

SEQ ID NO: 394 - DNA, 561 bp, Artificial Sequence
  Description of Artificial Sequence: Synthetic Transcript Sequence
atgcgcccacagattctactgttattggcattactgacattgggcctggctgcacagcaccaggacaaggtcccgtgcaagatggtcgataagaaagtgagttgccaggtactgggcttgcttcaagttccctcagtcctaccccctgacacggagactttagacctttccgggaaccagctccgcagtatccttgccagccctcttggcttctacaccgctcttaggcacctggacttgtctactaacgaaatcagctttttgcagcctggggctttccaggcgttgacccatctagaacatctgagtctagcccataacagactcgccatggctacagctctaagcgccggagggctggggcctctccctcgggtgacgtcgttggatctgagcggcaacagcctctactcagggctgctggagcgcttgttgggtgaagcaccatccctgcatacactttccctcgccgagaattccttgacaaggcttacgaggcatacatttagagatatgcccgctctagaacagctcgatctccatagcaacgttcttatgtag

SEQ ID NO: 395 - DNA, 1212 bp, Artificial Sequence
  Description of Artificial Sequence: Synthetic Transcript Sequence
atggctcacgccatggaaaacagctggacaatcagtaaggaataccacattgacgaggaagttggattcgccctcccgaacccacaagaaaatctgcctgacttctataacgactggatgttcatcgccaagcatcttcccgatttaatcgagagtggacaattgcgcgaacgcgtggaaaaactgaacatgctgtcgatagaccacttgactgaccacaagtcccagcgcttggcccgattggtgttgggttgcatcaccatggcgtatgtgtggggaaaaggacacggggacgtcaggaaggtcctccctagaaacattgccgttccctactgccaactgagcaaaaaattggagcttccacccatccttgtgtacgcagactgcgtgcttgctaactggaagaagaaggaccccaataaacccttgacctacgagaacatggatgtcttgttcagcttcagagatggtgactgtagcaagggcttttttcttgtgtccctacttgtagagatagctgcagcgtcagcaatcaaagttatccccacagtatttaaagccatgcaaatgcaagagcgggacaccctcctgaaggcactcttggaaattgccagctgcttggaaaaagctctgcaagtcttccaccaaattcatgaccatgttaacccaaaggccttctttagtgtgcttcggatctatttgagtggctggaagggaaatccccagttgtccgatggcctagtctacgaaggcttttgggaagatcctaaggagtttgccggagggtcagccggacagtccagcgtcttccagtgctttgacgtactgctgggcatccagcagaccgctgggggaggacacgctgctcagtttctccaggacatgaggaggtatatgccccctgcccacagaaatttcctgtgttctctggaatccaatccctcagtacgggagttcgtcctctccaaaggtgacgccggtctcagagaggcatacgacgcgtgtgtgaaagctcttgtctcactccgcagctaccacctgcagatagttaccaagtatatactgatacccgctagtcagcaaccgaaggaaaataagacatccgaagacccatccaagctggaggctaagggcactggaggcactgacctcatgaactttctgaaaacagtcagatctactactgaaaaatccctgctgaaagaaggttag

SEQ ID NO: 396 - DNA, 237 bp, Artificial Sequence
  Description of Artificial Sequence: Synthetic Transcript Sequence
atggcgcacgcgatggaaaactcttggactatttcgaaggaataccatatcgatgaggaagtgggtttcgcactgcccaatccacaggaaaaccttcccgatttctataatgattggatgtttatagctaagcacctccccgatctgatcgaaagcggccagttaagggaacgcgtggaaaaactgaatatgctgtctatagaccacttaactgaccacaagtcacagcggctttag

SEQ ID NO: 397 - DNA, 543 bp, Artificial Sequence
  Description of Artificial Sequence: Synthetic Transcript Sequence
atggcacacgcgatggagaatagttggaccataagcaaggaatatcatatagacgaggaagtggggttcgccctccccaatcctcaggagaatctgcctgacttttataatgattggatgttcatagccaaacacctcccggaccttatagagagtgggcagttgagagagcgggtcgaaaaactgaacatgctctccatcgatcatctcacggaccacaaaagccagcgcttggccagactagtgctggggtgtatcacaatggcatacgtgtggggaaaggggcatggggacgtgcggaaggtcctcccacgtaatatcgctgttccctattgtcagctcagcaagaagctcgaactccctccgattctggtgtacgccgattgtgtcctggctaattggaaaaagaaggacccgaacaagccactcacttatgagaacatggacgtcctcttcagtttccgtgacggagattgttccaagggcttttttcttgtctcattgttagtggaaattgctgccgcttcagctattaaggtctag

SEQ ID NO: 398 - DNA, 1212 bp, Artificial Sequence
  Description of Artificial Sequence: Synthetic Transcript Sequence
atggcccatgccatggaaaattcctggacgatttcaaaagaatatcacattgacgaggaggttggatttgccctacccaacccccaggaaaatcttcccgacttctataacgactggatgtttatcgccaaacacctaccagatctgattgaatcaggccagctccgggaacgggtcgaaaagctgaatatgctttctatcgaccacctcactgatcacaaaagccagcgccttgctcggctagtccttggatgcataactatggcttatgtgtggggaaagggacatggagatgtccgcaaagtactgccccgaaatatagcagtaccttactgtcaattgtccaagaaactcgagctgccacctatcctggtgtatgcggactgtgtgttagccaactggaagaagaaagaccccaacaagcccctcacgtacgagaacatggatgttctgttcagctttagagatggtgattgttctaaagggttttttttggtgagccttcttgtggagatcgccgcagccagcgcaatcaaggtgatacccacagtgtttaaggcaatgcaaatgcaagaaagggatacgctcttaaaggccttgctcgagattgcttcatgcctcgagaaggcactccaggttttccatcagatccatgatcacgttaaccctaaagcgtttttctctgtcctgcgcatctacctgtcagggtggaaaggcaaccctcagttatctgacgggctggtttacgaggggttctgggaggacccgaaggagtttgccggaggatccgccggacagtcatctgtgttccagtgttttgacgtactgctgggtattcagcaaactgccggtgggggacacgccgcacagtttctgcaggacatgcggagatatatgcccccagcccacagaaactttctgtgttcactggagagtaacccatcagtccgtgagttcgtgttaagcaagggggatgccggactgagggaggcctacgacgcctgcgttaaagcgttggtaagcttgcgctcgtatcacctacagattgttaccaagtacatcctgattcctgcctcacagcagccaaaggagaacaagacctcagaagatccaagcaaactcgaagcaaagggcaccggcggaacagaccttatgaattttcttaaaacagtcagatcaactacagaaaaaagcctcttaaaagagggctag

SEQ ID NO: 399 - DNA, 144 bp, Artificial Sequence
  Description of Artificial Sequence: Synthetic Transcript Sequence
atggcccacgctatggaaaactcatggaccatctcaaaagaatatcacatagatgaggaggtcggctttgctctccccaatcctcaagagaatctgccagatttttataacgactggatgtttattgcaaaacacctgccatag

SEQ ID NO: 400 - DNA, 1224 bp, Artificial Sequence
  Description of Artificial Sequence: Synthetic Transcript Sequence
atggaaccacatcggccaaacgtgaagacagcggtaccgctctccctcgagtcataccacatttctgaggagtacggatttctgttgccggattcactgaaagaacttcctgaccactacaggccctggatggagatcgctaacaaactgccccaactgatagacgcccaccagctacaggcccacgtggacaaaatgccacttttatcgtgccaatttctgaagggtcatagagagcaacgcttagctcatctggttctgtcgtttctcaccatggggtacgtgtggcaggagggggaggcccagcccgctgaggtgttgccccgaaatttagctttgcccttcgtggaggtgtcccgcaatctgggcctgccacccatcctggtgcatagcgatttagttctaaccaactggaccaagaaagatccagacggcttcttagagattgggaacttggagacgattatctccttccccggaggagagtctctccacgggtttattcttgtgacggccctcgtggagaaagaggcggtccccggaatcaaggcgctggtgcaggcaaccaatgctatactgcagcctaaccaagaagccttgctgcaggccctccagaggctgcgactgtccattcaagacatcaccaagacactaggacagatgcacgactacgtggacccggatattttttatgccggaatccgcatctttctgtccgggtggaaggacaacccggctatgcccgcaggtctgatgtacgagggagttagccaagaacctttgaagtacagcggtggatccgctgcacagagcaccgtgttgcatgcttttgacgaatttctcggaatccgccacagcaaagaatccggagacttcctctaccggatgagggactacatgccaccctctcacaaggcttttatcgaggatatccactctgcgccaagcctcagagactatatcctgtcctctgggcaggatcatctgttaacagcatataatcagtgcgttcaggccctcgcagagctgcgttcatatcacatcaccatggtcacaaaatatctgattacagcggctgctaaagccaaacatgggaagcctaaccaccttcccggaccgcctcaggcgttaaaagaccgaggaaccggaggcacagctgtcatgtcattcttgaagtcggtgagagataagacccttgagagtatcctgcatccgcgtggttag

SEQ ID NO: 401 - DNA, 1263 bp, Artificial Sequence
  Description of Artificial Sequence: Synthetic Transcript Sequence
atgcttcacttccactactacgacacaagtaacaaaatcatggagcctcaccggccaaacgtcaagacagcggtgccacttagtttggaatcatatcatattagcgaggaatacgggtttttgttgccagacagcctcaaagaactcccagatcactataggccttggatggaaatcgcgaataaactgccccagctgattgacgcccatcagctgcaggcccacgttgacaagatgccactactgtcatgccagttccttaagggtcatcgggagcagcgactagctcatttggtgctttcatttctgacaatgggctacgtgtggcaggagggagaagcacagcctgctgaggtgctgccacggaacctggcattaccctttgtcgaggtttcacgtaatttggggctgccccctattctggtgcactctgacctggtgctgacgaattggactaaaaaggaccccgatgggttcttggagatcgggaacctggaaaccattataagcttccctgggggagagtctcttcatggtttcattctcgtgaccgcacttgtggagaaagaagccgtaccagggatcaaggcacttgtccaagcaactaacgcgatattgcagccaaaccaggaggccttactgcaggcgctgcagcgattgagattgagcattcaagatattacaaaaactctgggccagatgcatgactacgtggatcccgacattttttacgccggaataaggattttcttgtctggctggaaagacaatcctgccatgcccgcagggctgatgtatgagggtgtgagtcaggaaccccttaaatacagcggaggatctgcagctcagtctaccgtcctgcatgcctttgacgaattcttaggcatcagacattccaaagagtcaggagatttcttgtaccgcatgcgcgattatatgcccccttctcataaggctttcattgaggatatccactctgctccctctctccgggattatattctctcctctggccaagaccaccttcttacagcttacaatcagtgcgtgcaggctctcgcagagttacgctcctaccacattacaatggtgacgaagtacctcatcactgccgcagctaaggctaagcacgggaaaccaaatcacctaccaggtcctccacaggcactgaaagataggggtactggaggcactgccgtcatgtctttcctcaagtcggttagagataagaccctcgagtcgattttgcaccctcggggttag

SEQ ID NO: 402 - DNA, 537 bp, Artificial Sequence
  Description of Artificial Sequence: Synthetic Transcript Sequence
atgcattcttctgctctactgtgttgcctggtcttactgaccggcgtgagggctagtccaggccaaggtactcaaagcgaaaactcatgcacacactttcctggcaacttgccaaatatgctgcgtgaccttcgggacgcattcagtagagtgaagacattcttccagatgaaagatcagctagacaatttgctccttaaggaaagcctgctggaagacttcaaagggtatctcgggtgccaggcactgtctgagatgatccagttttacctggaggaggtgatgcctcaggcagagaatcaggatcctgacattaaggcacacgtcaattccctcggtgaaaatctaaaaacactgcgactccgcttgagaaggtgccatcgattcctgccatgtgaaaacaagtccaaagccgtagaacaggttaagaacgccttcaataagctgcaggagaagggcatctacaaagctatgagcgaattcgatatattcatcaattatatcgaagcttacatgaccatgaaaattcgaaattag

SEQ ID NO: 403 - DNA, 762 bp, Artificial Sequence
  Description of Artificial Sequence: Synthetic Transcript Sequence
atgtggccacccggaagtgcctcacagcccccaccctcgccagcagccgcaaccggcctccatcctgccgcaagacccgtctccttacagtgtagattgtccatgtgtcctgccaggtcgctgctgctagttgccacactggtactattagaccacctgtcactggcccgaaatctcccagtagccacgccagaccctggcatgtttccttgtttacatcacagccagaatctgcttcgcgcagtatccaatatgctacagaaggctaggcagacactagaattctacccatgcactagtgaggaaatcgaccatgaagacattaccaaggacaaaacctcaacagtcgaagcgtgtctgcctttagaactgacaaaaaatgaatcctgcctcaactcaagagaaacctcatttatcaccaatggaagttgtcttgccagcaggaaaacttccttcatgatggccttgtgtctttctagtatctatgaagacttgaagatgtaccaggtggagttcaaaacaatgaacgcaaaactgttgatggacccaaagcgccagatatttctggaccagaacatgctcgccgttatcgatgaactgatgcaggccttaaactttaatagcgagaccgtgcctcagaagtcatccctagaggagcctgacttttataagactaaaattaagttatgcatcctcctgcatgccttccgcatcagggcagtgacgattgaccgcgtcatgagttacttgaacgcctcgtag

SEQ ID NO: 404 - DNA, 720 bp, Artificial Sequence
  Description of Artificial Sequence: Synthetic Transcript Sequence
atgtggccccctggttccgcttcccaaccacccccatctcctgcagccgctactggtctacaccccgctgcccgaccggtgagcttacagtgccggctgagcatgtgcccagccaggtctctcctactggtggccacactcgtgctgctggaccatttatccctggcgaggaacttaccagtggcaacacctgatcctggcatgtttccctgcctgcaccactcccagaacttgctaagagccgtttcgaatatgctgcagaaagccagacaaaccctcgagttttacccatgcacaagcgaggagatcgatcacgaagatatcaccaaggacaaaacttcaaccgtagaagcctgtctccctctggaacttaccaaaaacggctcctgcctcgcgagccgtaaaacttcctttatgatggccctatgcctcagtagtatttacgaggatcttaagatgtatcaggtggagttcaagactatgaacgctaaacttctcatggatccgaaaagacagattttccttgaccagaacatgctcgcagtgattgacgagctcatgcaggccttaaactttaactccgaaactgttccgcagaaatcctcactcgaggaaccagatttctataaaacaaaaattaagctttgcattctgctgcacgcatttcggatccgtgccgtgactatcgaccgagtgatgtcctacctcaacgcctcatag

SEQ ID NO: 405 - DNA, 648 bp, Artificial Sequence
  Description of Artificial Sequence: Synthetic Transcript Sequence
atgtggccacctggatccgccagccagccacctccttcacccgctgccgctactggcctccatccggcagccagaccagtgtccctgcagtgtcggctttcaatgtgtccagccagaagtctgctcctcgtcgctacgctcgtcctgctcgatcatctgtccttggcacggaatttgccagtggctacacctgatcctgggatgttcccatgtctgcatcacagccagaacctgttgcgagctgtttccaacatgttgcagaaaaatgaatcatgcctcaactcacgagaaacgagcttcataacaaacggaagttgcctggcgtcaaggaagacatctttcatgatggccttgtgcctgtctagtatttacgaggacctgaaaatgtaccaggtggaattcaaaacaatgaacgcaaagttactgatggaccctaagagacagatcttcctcgaccagaacatgcttgcagtgatcgatgagttaatgcaggctctgaatttcaattctgagaccgtgccccaaaaatcatccctggaggagcctgacttttataagaccaagatcaaactttgtatattgcttcacgcattccggatccgcgcagtgaccattgatcgcgtgatgtcttacctgaatgcctcatag

SEQ ID NO: 406 - DNA, 429 bp, Artificial Sequence
  Description of Artificial Sequence: Synthetic Transcript Sequence
atgagcctgttgccggtcccatataccgaagccgcttccctgtccaccggatctacggtcacaataaagggcagacccctagcatgttttctgaacgagccatacctacaggtggatttccacacagagatgaaggaggaatcagatattgtgttccacttccaggtttgttttggcaggagagtggtgatgaactcaagggagtatggcgcttggaagcagcaggtagagagcaagaacatgcctttccaagatggccaagagttcgagctatccattagtgttctgccagacaaatatcaggtcatggtaaacggccagagtagctacacatttgaccataggatcaagcctgaggcagtaaaaatggtccaagtgtggcgcgatatctcactgaccaagttcaatgtgtcctatctcaagcggtag

SEQ ID NO: 407 - DNA, 657 bp, Artificial Sequence
  Description of Artificial Sequence: Synthetic Transcript Sequence
atgagtttcgtaggggagaactcgggggtgaaaatgggaagcgaggactgggaaaaggacgaacctcagtgttgcttggaagatcccgcaggctccccactggagcctggaccatcactgcctactatgaattttgttcatacaagtccgaaagtcaaaaatcttaaccccaaaaagttctccatccatgaccaagaccacaaagtgctcgtgctggattcaggtaatctgatcgctgtcccagacaagaactatattcgtcctgagattttcttcgcccttgcctcttcgctctcatccgcaagcgccgaaaaagggagcccaattttactgggggtttccaaaggagagttttgtttatattgcgacaaggacaagggacagtcccacccatccttgcaactcaaaaaagaaaagctgatgaagcttgcggcacagaaggagtccgctcgcagaccattcatcttttatcgagcccaggtgggctcatggaacatgctggaatctgccgctcacccgggatggttcatctgcacgtcttgcaactgcaacgagccagtgggagtcacagacaagtttgagaatagaaagcatatcgagttcagctttcagcctgtgtgtaaagcggagatgtccccgagcgaggtgtctgactag

SEQ ID NO: 408 - DNA, 579 bp, Artificial Sequence
  Description of Artificial Sequence: Synthetic Transcript Sequence
atgagcgggtgcgacaggagagagactgaaaccaagggcaaaaattcttttaagaaacgactaaggggaccaaaagtgaagaatcttaaccctaaaaagtttagcattcacgaccaagaccataaagttttagtgctggattcagggaacctgattgccgtacccgacaaaaactacatcagacctgagattttttttgcactggccagtagcctgtcctctgccagcgctgaaaaggggtctccaatccttttgggtgttagcaaaggcgaattctgcttgtactgcgacaaagataagggccagtctcaccctagcctacaactgaagaaggagaaactaatgaaactggccgcacagaaagagtccgccagaagaccattcattttttatcgggctcaggttggtagttggaacatgttagaaagtgccgctcatccaggttggtttatttgcacctcctgtaattgcaacgagcccgtgggtgtaactgacaaatttgagaatcgcaagcacatcgaattttcttttcagcccgtttgtaaggctgaaatgagtccctcagaggtttctgattag

SEQ ID NO: 409 - DNA, 474 bp, Artificial Sequence
  Description of Artificial Sequence: Synthetic Transcript Sequence
atgtccttcgtcggcgagaacagcggcgtgaagatgggctctgaggactgggagaaggacgaaccacagtgttgtttagaagagatcttttttgctctcgcctccagccttagcagcgctagcgccgagaaaggaagtccaatcctgctgggcgtgagcaaaggagaattctgcttgtattgcgacaaggataaaggacagagtcaccccagcctgcagcttaagaaagagaaactgatgaaactcgctgcacaaaaggagtcagcccgacgtcccttcatcttttatagggctcaggtaggctcttggaatatgctggaatccgctgcccaccccggttggttcatctgtactagctgcaattgcaacgagcccgtaggggtcacagacaagttcgaaaacagaaaacatattgagttttcatttcagcccgtgtgcaaagccgagatgagcccctcagaggtgtcagactag

SEQ ID NO: 410 - DNA, 594 bp, Artificial Sequence
  Description of Artificial Sequence: Synthetic Transcript Sequence
atgtctttcgtcggcgagaattccggcgttaagatgggctccgaggactgggagaaagacgagccccagtgctgtttagaaggacctaaagtgaaaaacctcaatccaaagaaatttagcatccatgaccaggatcataaagttctagtgctggactccggcaatttgatcgccgtgcctgataagaactacattaggcctgaaatatttttcgctctggcttcaagtctgtccagcgcaagcgccgaaaagggttctccaatcctgttaggagtctccaaaggagagttctgtctgtactgtgataaggataaggggcagtctcacccatctttacagttgaagaaggagaagctgatgaagctcgccgcacagaaggagtccgcccgtcgacctttcattttctatagggctcaggttggttcttggaacatgttggagtccgcagcccacccaggctggttcatttgtacatcctgcaattgcaatgagcctgtaggcgttaccgataaattcgagaacagaaaacatatcgaattctctttccaacccgtgtgtaaggcggagatgagcccctccgaagtctctgattag

SEQ ID NO: 411 - DNA, 537 bp, Artificial Sequence
  Description of Artificial Sequence: Synthetic Transcript Sequence
atgtcatttgtcggggagaattccggcgtcaagatggggagtgaggattgggaaaaggacgaacctcagtgctgtctcgaagatcccgcaggctcacccctcgagcccggtccttcactgcccacaatgaacttcgtgcacacaaagattttctttgcgctggcctcgagcttgtcaagtgcgagcgcagagaaggggtcacccatcctactcggggtgtcgaagggagaattttgcctttattgtgataaggataaagggcaatcgcatcccagcctgcagttgaagaaggagaagctgatgaaattggcggctcagaaggaaagtgctagacgcccttttattttctacagggcccaggtgggctcatggaatatgctggaatctgctgctcaccccggttggtttatatgtacctcatgcaattgcaatgagcctgtgggcgtcactgacaaattcgaaaaccgaaagcacattgaattcagcttccagcctgtgtgcaaggccgagatgagtcctagcgaggtgtcggactag

SEQ ID NO: 412 - DNA, 1344 bp, Artificial Sequence
  Description of Artificial Sequence: Synthetic Transcript Sequence
atgattccaacattcacagctctgttgtgcctgggtctgtctctcggccctcggacccacatgcaggccggtccactcccaaaacccaccctgtgggccgaacccggatccgtgatttcttgggggaacagcgtcaccatctggtgccaggggaccctcgaagcacgcgagtatagactcgataaggaagagagccccgcaccatgggaccggcagaacccgctggagccaaaaaataaagccagattctctataccttccatgactgaggactacgccggaaggtacaggtgctattaccgttctccagtgggctggagccagcccagcgacccattagagctcgtgatgacgggtgcgtacagtaagccgaccctatcagcattaccgagccccctggtgaccagtgggaagagtgtgactctcctctgtcaaagcagaagccctatggacacgtttctgcttatcaaagaaagagcagcccaccccctcctgcatctgcgtagcgagcacggagcacaacagcaccaggccgaatttcccatgtctcctgtgacaagcgtgcatggaggaacgtatcggtgcttctccagccacggcttcagtcattacttactgtcccatccctcagaccccctcgagttaattgtttccggatccctagaggacccaagaccatcccccacacgatctgtctctacggccgctggccctgaggatcagcctctgatgccgaccgggtccgtgccccactccggcctccgaagacactgggaagtgctcattggggtccttgtggtgtccatactgctcctgagtctgctcttgtttctcctgctacaacactggcggcaagggaaacaccgaactctagctcagcgacaagcagacttccaacgccctccaggagcagccgagccagaacccaaggacggaggcctccagagacggtcatcccccgcagctgacgtgcagggcgaaaacttctgcgccgctgtgaagaatacacagccagaagacggcgtggaaatggacacacgctccccacacgatgaagaccctcaggctgttacatatgccaaggtaaagcacagccgcccacgccgagaaatggcctccccaccctccccgctgagcggagaatttctggacactaaagataggcaagcagaagaggatagacagatggacactgaggcagccgcatcagaagcgccacaagacgtgacctacgctcagctgcatagttttacccttaggcagaaagctacagaaccgcctccgtctcaagaaggtgcctctccagctgagccctctgtgtatgccaccctggcaatccattag

SEQ ID NO: 413 - DNA, 636 bp, Artificial Sequence
  Description of Artificial Sequence: Synthetic Transcript Sequence
atggtagctcataaccaggtggcggctgataacgccgtgagtaccgcagccgaacccaggaggagaccagagccttcctccagctcaagcagttctcctgccgctcctgcccgaccgcgtccatgccccgcagtgcccgctcccgctcccggagatactcattttagaacttttagaagtcatgcagattaccggagaattacaagagcttctgccttgcttgacgcttgcgggttctattgggggcctctaagcgtgcatggtgcacatgagaggcttcgtgccgaacccgttggtacattcttagtcagggactcccggcaaaggaattgcttctttgccctgtcggtgaagatggctagcgggcctacctccattagggtccatttccaagccggaaggttccacctggacgggagcagagagtccttcgattgcctcttcgaattattggaacactacgttgccgctcccagacgtatgctcggcgcaccactccggcaacgacgtgttcggcctcttcaggagctctgtagacagcgtatagtggccactgtcggacgagaaaacctggcaagaattccactgaaccccgtgctacgtgattacttgtccagttttccctttcagatttag

SEQ ID NO: 414 - DNA, 1596 bp, Artificial Sequence
  Description of Artificial Sequence: Synthetic Transcript Sequence
atggcggcaactctggacctcaaatctaaagaggagaaggatgcagagctggacaaacgcatcgaggcccttcgaagaaaaaatgaagccctgatcaggcgttaccaggaaattgaagaggatcgcaaaaaggcagaacttgagggggttgctgtgacagcccctcggaaaggtagatcagttgagaaggagaatgtagctgtcgaaagcgaaaagaacctgggtcccagcagacggtcccctgggacccctcgccctcctggcgctagcaaaggagggagaacccctccccaacaagggggacgggcaggaatgggcagagcttcccgcagctgggagggttccccaggggaacagccacgaggcggaggtgctggagggaggggaaggcggggaagaggcagagggtctccacatctttcaggcgctggggatacttctataagcgatcggaaatccaaggagtgggaagagaggcgacggcagaacattgagaagatgaacgaggagatggagaaaatcgcggagtatgagcgaaaccagcgcgagggtgtgcttgagcccaatcctgtgcgaaactttctcgatgatcccaggcgacgttcagggcctctggaagaaagcgagagggacagacgtgaggagtcgaggaggcacggcaggaattggggtggacctgatttcgagcgcgttcgctgcggactggaacatgagcgccagggtcggagggcgggactgggcagtgcaggggatatgacactgagtatgacggggagggaacgctcggagtaccttcgttggaaacaggaacgtgaaaaaatcgatcaagagcgcctccagcggcaccgtaagccgactgggcaatggaggagagaatgggacgccgagaagacagacggtatgtttaaggacggtcccgtacctgcacatgagcctagccatagatacgacgatcaggcctgggctcgccctcctaaaccaccgacatttggagagttcctcagccagcacaaggccgaggcctccagtcgtcgaaggcgcaaaagcagcaggcctcaggcaaaggccgcaccccgagcctacagtgatcatgatgatcgctgggagacaaaggagggtgccgcaagtccagcacctgaaacaccccagcctacgagtcctgagacctcgcctaaggaaacgccaatgcaaccccctgaaatccccgctcccgctcaccgacctccagaagatgagggagaagaaaatgagggagaggaggatgaggaatgggaggacataagtgaagacgaggaggaggaggagattgaggtagaagaaggggacgaggaagagccggctcaggatcaccaagcacctgaggctgcgcctactggcattccgtgctccgagcaggcccacggcgtaccattcagcccagaggaacccctgctcgagccccaggcaccaggcacacccagctcaccatttagccccccttcggggcaccagccagtttctgattggggggaagaggtggagttaaattcacctcgtacgacccatctggcaggagccctgagccctggggaggcctggccttttgaaagtgtgtag

SEQ ID NO: 415 - RNA, 1062 nt, Artificial Sequence
  Description of Artificial Sequence: Synthetic Transcript Sequence
auggagcucacugaguuacuucuuguggugaugcuguuguuaacggcgagauugacccucucaucuccagccccacccgccugcgaccuuagggugcugaguaagcuucuuagagacucccauguacuacacagccgucucucccaaugucccgaggugcauccucuuccuacaccgguccugcugccagcugucgacuucagucugggagaauggaagacucagauggaggaaacgaaagcccaggauauacucggggcugugacccuucugcuggagggagucauggccgcucgaggccagcuggggccuaccuguuuauccagccuccucggccaauuguccggacaaguaagauuauugcuuggagccuuacagagucuccuggguacacagcuaccuccacaaggccgcacuaccgcucauaaagaccccaaugcuauuuuucugucauuccagcaucuguuaagaggaaaggucagguucuugaugcucguggggggcuccacucugugcguaaggcgagcccccccuaccacagcagugccaucucggaccucccuggugcuuacccucaaugaacugccuaacagaacauccggucucuuggagacaaacuuuacugccucugcucggacaaccggaucgggacugcugaaguggcagcagggcuuucgggccaaaauucccggacuacucaaucagacaucaaggaguuuggaccaaaucccgggguaccugaaucguauacaugagcuuuuaaacggcacucggggucuguuccccggccccucucgucguacacucggcgcccccgacauaucgucuggcacgucugacacagguucccugcccccuaacuugcagccuggcuacucucccuccccgacucaccccccaaccggacaguauacccuuuucccucugccacccacacugccaacuccagugguacaacuacacccauuguugccagauccuagugcacccacccccacccccacuuccccucugcuaaacacgaguuauacacacucucagaaccuuucccaagaagguuag

SEQ ID NO: 416 - RNA, 537 nt, Artificial Sequence
  Description of Artificial Sequence: Synthetic Transcript Sequence
augacgguuuuagcuccagcuuggagccccaccacuuaccuacuuuugcuucuguuguuguccucuggccucucuggcacccaggauugcuccuuucagcacaguccuaucuccuccgacuucgccgucaaaauuagagagcucucagacuaccuucuccaggauuauccugugacaguugccuccaaucuccaggacgaagaacugugugggggccucuggcgacucgugcuggcucagagguggauggaaagacuuaaaacuguggccggcucaaagaugcaaggucuucuggagagaguuaauacugagauucauuucgugacaaagugcgcuuuucagccaccaccuuccugcuuaagauucguccagaccaauaucagccgcuugcugcaggaaacuucagaacagcucgucgcccucaagccuuggauaacccgccagaacuuuaguaggugcuuagaacuccagugccagcccgucgaaacaguuuuucauagaguuagccaggauggccuggaccuacugacgucuuag

SEQ ID NO: 417 - RNA, 762 nt, Artificial Sequence
  Description of Artificial Sequence: Synthetic Transcript Sequence
auguggcccccaggaagugcuucucaaccuccaccaagccccgcggccgcuacuggacugcauccugccgcccgccccgucucucuccaaugucgucugucaaugugcccggcuagguccuuacugcucguggccacucuagugcugcuggaccaccuuagccuggcccgcaaucugccaguggccaccccggaucccggcauguuucccugucuccaccauucucagaaccuuuugcgggcggugucuaacaugcugcaaaaagcaaggcaaacacuggaguuuuacccaugcaccucugaagaaaucgaccacgaggacauaacuaaagauaaaacaaguacgguggaagcuugcuuaccucuugagcugaccaagaaugaguccugcuugaacagccgcgagacgucuuuuauuacaaacggcucaugcuuagcgucacgaaaaacuagcuucaugauggcucugugccugucaucaauuuaugaggaucucaaaauguaccagguggaauuuaaaacgaugaaugcgaaacuguuaauggacccaaagcgccagauuuuccuugaucagaauaugcuggcagugaucgacgaacugaugcaggcacuuaauuucaauagcgagacggucccgcagaaaucaucccucgaggaacccgacuucuauaagacuaaaauuaaacuguguauacucuuacacgccuuuagaauacgggcugugacuauugauagggugaugagcuaccucaaugcaucuuag

SEQ ID NO: 418 - RNA, 720 nt, Artificial Sequence
  Description of Artificial Sequence: Synthetic Transcript Sequence
auguggccaccaggaagcgcaucccagccacccccaucucccgccgcugccacgggccuccaucccgcugcacguccggucucauugcagugcagauuaagcaugugccccgccagaucuuuauuacugguagccacccugguuuuacuagaucaccucucacuagcucgcaaucuaccgguugcuacccccgacccgggcauguuucccugcuuacaccacucccagaacuugcugcgggcaguguccaauaugcuccaaaaggcucggcaaacauuggaguuuuacccaugcacaucagaggagaucgaccaugaggauauuacuaaggacaaaacauccaccgucgaggccugucugccucuggagcugacuaaaaaugggagcuguuuagcgucuaggaagacaucuuucaugauggcauuaugucuguccagcauuuaugaggaucuuaagauguaucaaguggaauuuaaaaccaugaacgccaaacuccugauggauccuaagcgucaaauuuuccuggaucaaaauaugcuugcggugaucgaugagcuuaugcaagccuuaaacuuuaauuccgagacagucccacaaaagucgagucucgaggagcccgauuuuuauaagacuaagauaaagcuguguaucuuacuucacgccuuucgaauccgagcagucaccaucgauagaguuaugucauaccugaaugccucuuag

SEQ ID NO: 419 - RNA, 648 nt, Artificial Sequence
  Description of Artificial Sequence: Synthetic Transcript Sequence
auguggccccccgggucugccagccaaccgcccccaagucccgccgcagccacugggcuucacccagcugcccgucccgucucgcugcagugcaggcuguccauguguccugcccguucgcuguuacuggucgccacgcuagugcuccuggaucaccuuucccuagcuagaaaucuuccuguugcaacccccgacccaggaauguuuccaugccuacaccacucacaaaaccuauugcgugcuguguccaauaugcuacaaaagaaugagucuugccugaauagucgagaaaccucauucauuaccaauggcuccugucucgccagcagaaagacuagcuuuaugauggcacugugcuuaucaucgauuuacgaggauuuaaaaauguaccagguugaguuuaagacaaugaaugccaagcuccugauggaccccaagagacagaucuuucucgaccagaacaugcuggccguaaucgacgagcugaugcaggcucugaacuucaacuccgagaccgugccgcagaagucaucuuuggaggagcccgauuuuuacaaaacaaaaauuaaacugugcauccugcuccaugccuuccgcauccgggcugucacgaucgaccggguuaugaguuaucugaaugcaucguag

SEQ ID NO: 420 - RNA, 1062 nt, Artificial Sequence
  Description of Artificial Sequence: Synthetic Transcript Sequence
auggaacuuaccgaacugcuacuaguaguaauguuacuucugaccgcuaggcuuacucugucauccccagccccccccgccugugaucugaggguccuuuccaaacuccuccgggauagucacgugcugcacagucgacucucccagugcccagaagugcauccccugccuacucccguucuccuucccgccguggauuucucccugggagaauggaagacccagauggaggagacuaaagcccaagacauccugggugccguaacucugcuguuagaaggggugauggccgcgagagggcagcugggucccacuuguuugaguagucuguuaggucagcugagcggucaaguccgucugcuacugggcgcucuccagagucuucuaggcacccaacuaccaccucaaggacgcacaacugcucacaaagauccuaaugcaauuuuucucucauuucaacaccuccuucgggggaagguuagguuucuuaugcucgucggcggcagcacccugugcgugagaagagcgccaccuacgaccgcugucccuucgaggacaucccuuguauuaacccugaacgaauuaccuaaccggacuagcgggcugcuugaaaccaacuucacagcaucugcuagaacuacuggguccgggcugcugaaauggcaacaaggcuuccgcgccaagauuccuggccuguuaaaucaaaccucccgcucccucgaccagaucccuggcuacuugaaccgcauucacgaacuguuaaacggcacuagaggccuguuccccggaccuucacgcagaaccuuaggagccccugauaucuccucaggcacuuccgauacuggcucgcucccaccuaauuuacaaccgggcuacuccccaagccccacacacccaccuaccggccaauacacucuuuuuccacugccuccaacgcuccccacuccugucgugcagcuucaccccuuauuacccgaccccucugcucccacuccuacccccacaagcccccugcucaauaccuccuauacacauucucagaaucucagccaggaaggcuag

SEQ ID NO: 421 - RNA, 537 nt, Artificial Sequence
  Description of Artificial Sequence: Synthetic Transcript Sequence
augaccguucucgccccagcuugguccccuaccacuuacuuauugcugcuacugcugcucagcuccggauuaagcgggacccaagacugcucguuccaacauagucccauuucuucugacuucgcugugaagauucgcgaacuaagugauuaucuccugcaggauuaucccgugacuguggccagcaacuuacaggaugaagaacugugcggaggacuguggagauuaguucuggcacaaagauggauggaacggcuuaagacaguggccggaucuaaaaugcagggcuugcuugaaaggguaaauacugagauccauuucgucacaaaaugugcuuuccagccuccccccucaugucuucgcuucgugcaaacaaacaucaguagacuccuccaggagaccagcgaacagcuaguggcccugaaacccuggauaacccgccagaacuuuucccgcugccucgagcuacagugucaacccgucgagacaguguuccaucgagucagucaggacggccuugaucuacucaccagcuag

SEQ ID NO: 422 - RNA, 762 nt, Artificial Sequence
  Description of Artificial Sequence: Synthetic Transcript Sequence
auguggccuccuggaagcgcgucccaaccaccuccuucccccgcagccgcuaccggacugcaccccgcggcucgaccagugucccugcaaugucgccuuagcaugugcccugcucgaucccuccuccucguugcaacauugguacuguuggaccaccugucccuggcccgaaauuugccuguugcgacucccgauccugguauguucccaugucuucaccacagucagaaccugcugcgcgcugucucgaacaugcuccaaaaagccaggcaaacucucgaauuuuaucccuguacaagcgaagaaaucgaccacgaggacauaacuaaagauaaaacaaguacgguggaagcuugcuuaccucuugagcugaccaagaaugaguccugcuugaacagccgcgagacgucuuuuauuacaaacggcucaugcuuagcgucacgaaaaacuagcuucaugauggcucugugccugucaucaauuuaugaggaucucaaaauguaccagguggaauuuaaaacgaugaaugcgaaacuguuaauggacccaaagcgccagauuuuccuugaucagaauaugcuggcagugaucgacgaacugaugcaggcgcuuaauuucaacagcgaaaccgucccgcagaaaucaucccuagaagagccagauuuuuacaaaacuaaaauuaagcuguguauccuccuccacgccuuucggauacgggccguaacuauugaucgaguuaugucauaccucaacgcgagcuag

SEQ ID NO: 423 - RNA, 720 nt, Artificial Sequence
  Description of Artificial Sequence: Synthetic Transcript Sequence
auguggcccccuggaagcgcuucccagccaccaccaucuccggcugccgccacuggauugcacccugccgcucgaccaguuucgcuccaaugucgccuguccauguguccugcucgaagccuccugcuaguggcaacucuggugcugcucgaucaccugucucuugcccguaaucugccaguggcuacuccugaucccggcauguuucccugccuccaccauagccaaaacuugcuucgcgcaguguccaauaugcuccagaaggcucgacagacccucgaguucuaucccuguacuuccgaagaaaucgaucaugaagacaucaccaaggacaaaaccaguaccguagaagccugcuuaccauuagaauuaacaaagaaugggucaugucucgccuccagaaagacuucauucaugauggcacuuugccuguccagcaucuaugaggaucugaagauguaccagguggaauucaagacuaugaacgcaaaguugcugauggauccuaaaagacagaucuucuuggaccagaacaugcucgcagugauagaugaacugaugcaagcccugaacuuuaacuccgaaaccgugccucagaagucuucccuugaagagccagauuucuauaagaccaagauuaaacuauguauccugcugcacgccuuccggauuagagccgucacuauugaccgcgugaugagcuaccuuaacgccuccuag

SEQ ID NO: 424 - RNA, 648 nt, Artificial Sequence
  Description of Artificial Sequence: Synthetic Transcript Sequence
auguggccacccgggagcgcgagucagccaccccccuccccagcagcugcaacuggccuccaccccgcugcccgcccagugucccugcagugcagacuuucaauguguccugcccgaucccucuugcuggucgcuacccugguacugcuugaucaucugucccuagcccguaaucuuccugucgccacaccggaucccggaauguuuccuugccugcaucacagucagaaccuucugcgugccguaagcaauauguugcagaaaaacgagucuugucuuaacaguagagagacuucuuuuauaacgaacgguagcugccucgccucucgcaagacaucauucaugauggcccugugccuuaguucaaucuacgaggaccuuaagauguaucagguagaauuuaaaacgaugaacgccaaacuguuaauggauccgaagcgucagauuuuucuggaccagaacauguuagcgguuauugaugagcucaugcaagcccuaaauuucaacagcgaaacagugccucaaaaaagcagccuagaggagccagauuucuauaaaacaaaaaucaaauuaugcauccugcuacacgcuuucagaaucagagcuguaaccaucgauagagucaugaguuaucugaacgcguccuag

SEQ ID NO: 425 - DNA, 534 bp, Artificial Sequence
  Description of Artificial Sequence: Synthetic Transcript Sequence
atgcattcctccgctctcctgtgctgcctagtacttctcaccggagtccgggctagcccaggtcagggcactcagtctgagaattcatgtacacacttccctggcaatctccctaacatgcttcgtgacttgagagacgccttctcccgggtcaagacattctttcagatgaaggaccagttagacaaccttctcttaaaggaatcgctgctcgaggacttcaaagggtacctgggatgtcaggcgcttagtgaaatgatacagttttatcttgaagaggtcatgccacaggccgaaaaccaggaccccgacattaaagctcacgtcaattcactgggcgaaaatctgaaaacccttcggctgagacttcggaggtgccacagatttctgccatgcgagaataagtccaaggctgtggagcaagttaagaatgccttcaataagctgcaggagaagggcatctacaaggccatgtctgaatttgatattttcatcaactacatagaagcctatatgacgatgaagatccggaac

SEQ ID NO: 426 - DNA, 534 bp, Artificial Sequence
  Description of Artificial Sequence: Synthetic Transcript Sequence
atgcatagtagcgcactattgtgctgcctcgtcctgttgacaggagttcgcgctagccctggccaaggcactcagtcagaaaattcttgtacgcactttccggggaatctaccgaacatgttacgcgaccttcgagatgcgttctcgagggttaaaacgttctttcaaatgaaggatcaattggacaacctacttcttaaagaaagtcttttagaagactttaagggttacttagggtgtcaggcgctgtctgaaatgatccaattttatttggaggaagtaatgccacaagcggaaaatcaggatcctgacataaaagctcatgttaactctctgggcgagaatctaaaaacattgcgtttaaggttgagacgttgccaccgttttctaccctgcgagaataaaagcaaagctgttgaacaagtaaagaacgccttcaacaagttgcaagaaaagggaatttataaagcaatgtcagagtttgatattttcattaactacattgaagcgtacatgacgatgaagataagaaat

SEQ ID NO: 427 - DNA, 534 bp, Artificial Sequence
  Description of Artificial Sequence: Synthetic Transcript Sequence
atgcactcatcggcgctcctttgctgcttagttcttcttacgggtgttcgcgcctcgcccggtcagggaactcaatcagagaactcttgcacacattttccgggtaatcttcctaatatgttgagagatcttcgcgatgcattctcgcgggtcaaaacctttttccaaatgaaagaccagctagacaaccttctgttgaaagaatcgctgctcgaagatttcaagggctacctgggttgccaggccctatcagagatgatccaattttatctcgaagaagtgatgccgcaggctgaaaatcaggatccggatatcaaagcccatgtaaactccctgggggaaaacctgaaaacactgcgtctgcgtctgcgaagatgccatcgatttctgccctgtgagaacaaatctaaagccgttgaacaggtgaagaatgcattcaacaaattgcaggagaaaggcatctacaaagcgatgtcggaattcgatatctttattaattacatagaagcttacatgacaatgaaaatccgcaac

SEQ ID NO: 428 - DNA, 534 bp, Artificial Sequence
  Description of Artificial Sequence: Synthetic Transcript Sequence
atgcactcaagtgccctattatgttgtcttgtccttcttacaggagtacgggccagtcccgggcagggaactcaatctgaaaattcatgcacacattttcctgggaacctccccaatatgttgagagatctccgggatgccttctctagagtgaaaacatttttccagatgaaggatcagcttgataacctactactgaaagaatcccttctggaggattttaaaggatacttagggtgccaggctctatctgaaatgatacagttttacctggaagaagtgatgcctcaggcggaaaatcaggatcccgatatcaaagcccatgtcaatagtctaggggaaaacctgaaaacgttgaggctgcgactccgccgttgccatcggttcctaccctgtgaaaataagtctaaggcagtcgaacaggtgaaaaatgccttcaataaattgcaggagaaagggatttataaggctatgagtgaatttgatatattcatcaattatatcgaagcttatatgacaatgaaaattcggaat

SEQ ID NO: 429 - DNA, 534 bp, Artificial Sequence
  Description of Artificial Sequence: Synthetic Transcript Sequence
atgcattcgtcggcgttattatgttgtttagtattactaacgggtgttcgtgcgtcgccgggtcaaggtacgcaatcggaaaattcgtgtacgcattttccgggtaatctaccgaatatgctacgagatctacgagatgcgttttcgcgagtaaaaacgttttttcaaatgaaagatcaattagataatctattactaaaagaatcgttactagaagattttaaaggttatttaggttgtcaagcgctatcggaaatgatacaattttatttagaagaagttatgccgcaagcggaaaatcaagatccggatataaaagcgcatgttaattcgctaggtgaaaatctaaaaacgctacgattacgtctacgacgttgtcatcgatttctaccgtgtgaaaataaatcgaaagcggtagaacaagtaaaaaatgcgtttaataaattacaagaaaaaggtatatataaagcgatgtcggaatttgatatatttataaattatatagaagcgtatatgacgatgaaaatacgtaat

SEQ ID NO: 430 - DNA, 534 bp, Artificial Sequence
  Description of Artificial Sequence: Synthetic Transcript Sequence
atgcatagcagtgcgctgctgtgttgcttagtgttgctgactggggtcagagcatctcctggacagggaactcagtcagaaaactcctgtactcacttccctgggaatctgccaaatatgctcagggacctacgcgacgctttttcccgagtgaagaccttctttcagatgaaggaccagttagacaatctgctgttgaaggagagtctccttgaggacttcaagggctatctggggtgtcaggcactgtctgaaatgatacagttctatcttgaagaagtgatgccgcaggccgagaatcaggacccagacataaaggcccatgtcaacagtctcggagagaatctcaagacactgagattgcggctgcgccgatgccaccgctttctgccatgcgagaacaaatctaaggctgtagagcaggtgaagaatgcattcaacaagcttcaggaaaaaggtatatacaaagctatgtccgaattcgatatcttcataaactacatcgaggcatacatgacgatgaagatcaggaac

SEQ ID NO: 431 - DNA, 534 bp, Artificial Sequence
  Description of Artificial Sequence: Synthetic Transcript Sequence
atgcattcatcggcacttctctgttgccttgtccttcttaccggagtgcgggcatcgcctggacaaggaacccagtccgagaacagctgtactcattttcctggtaacctgcctaacatgctcagggatctgcgcgacgcgttctcgcgggtgaaaacgttctttcaaatgaaggatcagctggacaatctgctgctgaaggagtcactgctggaggactttaaaggctacctggggtgccaggctcttagcgagatgatacagttttacttggaagaagttatgccccaagccgaaaatcaagacccggacattaaggcacacgttaattcccttggcgagaacctcaagactcttcgcttgagacttcgacgttgtcaccgattcctgccgtgtgaaaacaagtcgaaggcagtagaacaagtgaaaaacgcattcaataagctccaagaaaaaggtatctacaaggccatgtccgagtttgacattttcatcaactacattgaggcttatatgaccatgaagattagaaac

SEQ ID NO: 432 - DNA, 534 bp, Artificial Sequence
  Description of Artificial Sequence: Synthetic Transcript Sequence
atgcatagcagtgccctcctgtgttgcctcgtcctcttgaccggtgtgcgagctagccctggtcaaggtacgcaatctgagaactcatgcacccatttccccggcaaccttcctaatatgctgcgcgaccttagggatgcgttttcccgtgtcaagactttctttcagatgaaggatcaactcgacaacctccttttgaaggaatcactgctggaagatttcaaaggataccttggctgtcaggcactgtcggaaatgattcagttttacctggaagaagtcatgccccaagcagaaaatcaagatcctgacatcaaggcacacgtgaactcactgggagagaacctcaagacccttcggctgagacttagacgatgtcaccggtttctcccatgtgagaacaaaagtaaggccgtggagcaagtgaaaaatgcattcaataagctccaggaaaagggtatttacaaagctatgtcggaatttgacatcttcataaactacattgaggcatacatgactatgaagattcgaaac

SEQ ID NO: 433 - DNA, 534 bp, Artificial Sequence
  Description of Artificial Sequence: Synthetic Transcript Sequence
atgcattcgagtgccttactttgttgcctcgtactactcacgggagttagggcatcgccaggccagggaacccagagcgagaacagttgtacacactttcccggtaacttgcccaatatgttgagggatcttcgggacgctttcagcagagtcaagactttcttccagatgaaagaccagttggacaatctgctgctgaaagaatctttgctggaggatttcaaaggatacttgggctgccaagcattaagcgaaatgatccagttctatttagaggaagtgatgccccaggcagagaaccaagacccagatataaaggcccatgtgaactccctgggcgaaaacctgaagacacttaggcttcggctgcgtcgctgccaccggtttcttccctgtgaaaacaagagtaaagccgtcgagcaggtcaagaatgcatttaataaacttcaggagaagggtatttacaaagccatgagtgagttcgatatctttataaattatatagaagcatatatgaccatgaaaatcagaaat

SEQ ID NO: 434 - DNA, 534 bp, Artificial Sequence
  Description of Artificial Sequence: Synthetic Transcript Sequence
atgcactcttcagcgcttttgtgctgtctcgtgttactcacgggcgtgcgtgccagcccgggacagggaacccaatccgaaaactcatgtactcatttcccgggaaacctgcccaacatgctcagggacctcagagacgcttttagtcgggtgaagaccttttttcagatgaaagatcagctggacaatctattactaaaagagagcttactggaggattttaagggatatctcgggtgccaagccctctccgagatgattcagttttatctcgaggaggtaatgccacaggcggaaaaccaggacccggacattaaggcgcacgtcaactcgctgggagagaatttgaaaacactacggctgcgactcaggaggtgccatcggttcctcccatgcgagaacaaaagcaaggccgtggagcaggtgaagaacgcgttcaataagttgcaagaaaaggggatttacaaggccatgtctgaatttgacattttcataaactatatagaggcctatatgactatgaagatccgtaat

SEQ ID NO: 435 - DNA, 534 bp, Artificial Sequence
  Description of Artificial Sequence: Synthetic Transcript Sequence
atgcactcgtctgctcttctctgttgccttgtgctgttgacgggggtgcgagcttcgccaggtcaaggaacgcaatcggagaacagctgtacacacttcccaggtaatttaccaaacatgttaagagatctacgtgacgcattttcaagggtcaaaacgttttttcagatgaaagatcagctagacaacctgcttcttaaggagtccttactggaagatttcaagggatacttaggatgtcaagcactatcagaaatgatccaattctacctggaggaagtcatgccacaagctgaaaatcaagatcctgatataaaagctcatgtcaacagccttggagaaaatctgaaaacgctcagattacggcttagaagatgtcaccgatttctgccatgtgaaaataagtctaaagcagtagaacaggtcaaaaatgcctttaataagttgcaagaaaaaggaatttataaagcgatgtcagaatttgacatttttattaattacattgaggcctacatgacaatgaagatccgaaat

SEQ ID NO: 436 - DNA, 534 bp, Artificial Sequence
  Description of Artificial Sequence: Synthetic Transcript Sequence
atgcatagtagcgctctcctttgctgtcttgtgctgctcaccggagtgcgagccagccccggtcagggcactcagtcggagaattcctgcactcacttcccggggaacctgccgaacatgctgagggacctcagagacgcattttcacgcgtcaaaacgttcttccagatgaaagaccaactcgataacctgctccttaaggaatcgctgctggaagatttcaagggatacctggggtgtcaagcgctcagtgaaatgatccagttctacctcgaagaggttatgccacaggcggagaaccaggatccagacatcaaggcccacgtcaattcacttggtgaaaatctgaaaaccctgcggctccgcttgcgccgctgccaccgctttctcccgtgcgaaaacaagtctaaggctgtggaacaagtgaagaacgctttcaacaagctccaggagaagggaatctataaggccatgtcggagtttgatatctttatcaactacattgaagcatacatgaccatgaagatccggaac

SEQ ID NO: 437 - DNA, 534 bp, Artificial Sequence
  Description of Artificial Sequence: Synthetic Transcript Sequence
atgcattcaagcgctctcctttgttgtctggtgctcctcactggagtgagagcaagccctggtcagggaacgcaatcagagaacagctgtactcatttccctggaaacctgcccaatatgctgagagacttgcgcgatgccttctcgcgagtcaagaccttcttccaaatgaaggaccaacttgacaacctgctgctgaaggaatcgctgcttgaggactttaaaggctacctgggttgccaagctctgtcggagatgattcaattctaccttgaagaggtcatgccacaggcggaaaatcaagatcctgacataaaggcacatgtcaacagccttggagaaaatcttaagaccctgcgccttcgcctccgccgctgtcatcgttttctcccctgcgaaaacaagtccaaagcggtggaacaagtgaagaacgcatttaacaaacttcaggagaagggaatttacaaggccatgtcagagtttgacatattcattaactacattgaagcatacatgactatgaagatccggaac

SEQ ID NO: 438 - DNA, 534 bp, Artificial Sequence
  Description of Artificial Sequence: Synthetic Transcript Sequence
atgcactcctccgcgctgctgtgctgcctggttctcctgaccggagtccgggcctcgccgggccaggggacccagtcagagaattcgtgtactcacttcccaggaaatctccctaacatgctgagagatctccgcgacgccttctcaagagtgaaaacttttttccaaatgaaggaccagctcgacaatctgctgctgaaggaatcgctgctcgaggacttcaagggatacctgggctgccaggcactgtctgagatgatccagttttatctcgaggaggtcatgcctcaagctgaaaatcaggacccggatatcaaggcacatgtcaactccctgggagagaatctgaaaacgctgcgcctcagactccggcgctgtcatcgctttttgccgtgcgagaacaagagcaaggccgtggagcaagttaagaatgcgttcaacaaacttcaggaaaagggcatatacaaggccatgtctgaattcgacatcttcatcaactacattgaagcctacatgaccatgaagatcagaaac

SEQ ID NO: 439 - DNA, 534 bp, Artificial Sequence
  Description of Artificial Sequence: Synthetic Transcript Sequence
atgcactcctcggcactgctctgttgcttggtcctccttaccggagtcagggcgtcaccaggccaaggtacgcagtccgaaaactcatgcacccacttcccagggaatttgcctaatatgctgcgggacctgagggacgcgttttcgcgcgtgaaaacgttttttcagatgaaggatcaactggacaaccttctgcttaaggaatcactgctggaagatttcaagggttacctcggatgtcaagctctttccgaaatgattcaattctaccttgaggaagtgatgcctcaggccgaaaaccaagatcccgatatcaaagcacatgtgaattccctcggcgaaaacttgaaaacgttgcggttgcgattgaggagatgccatcgttttctcccatgtgaaaacaagagcaaggcagtcgagcaagtcaagaacgcattcaataaactccaggagaaaggcatttacaaggcaatgtcggagtttgacatctttatcaactatattgaagcctacatgaccatgaagatccgcaac

SEQ ID NO: 440 - DNA, 534 bp, Artificial Sequence
  Description of Artificial Sequence: Synthetic Transcript Sequence
atgcattcctccgccttgctctgttgcctggtgttgctgacaggtgtgcgcgcttccccaggacagggaacccagagtgagaacagctgcacgcatttccctggtaacctccctaatatgttgagagatctccgcgacgctttcagccgggtgaagactttcttccagatgaaagaccagttggacaacctcctgctgaaagaaagtttgctggaggacttcaagggttacctgggatgtcaggccctgtctgagatgattcagttctacctggaagaggtgatgccacaagcagagaaccaggacccagacatcaaagcccatgtgaacagcctcggcgagaatctcaagactttgcggctgcggctgagacgatgccaccggtttctgccttgcgagaataaatccaaagccgtggagcaggttaaaaatgccttcaataagctccaagagaagggaatttataaggctatgagcgaatttgatattttcataaattatatagaggcctacatgaccatgaagatcaggaac

SEQ ID NO: 441 - DNA, 534 bp, Artificial Sequence
  Description of Artificial Sequence: Synthetic Transcript Sequence
atgcacagctcggccttgctgtgctgcctggtgctgcttaccggagtcagagcatcccccggtcaaggcactcaatcggagaactcttgtacccacttccccgggaatctgccaaacatgctgcgtgacttacgagatgccttttctcgcgtgaaaacgttctttcagatgaaagatcagctggacaatctgttgctgaaagagtctttgcttgaggactttaaggggtacctggggtgccaggcccttagtgaaatgatccagttttatcttgaagaggtgatgccgcaggccgaaaatcaggacccggatataaaggcccatgtgaattcacttggggaaaatttgaaaacactgaggttgcgccttcgccgctgtcatagattcctgccttgtgaaaataagagtaaagctgttgagcaggtaaaaaacgcgtttaacaagttgcaggagaaggggatctacaaggcaatgagtgagttcgatatcttcatcaattatattgaggcatatatgactatgaagatacgcaat

SEQ ID NO: 442 - DNA, 534 bp, Artificial Sequence
  Description of Artificial Sequence: Synthetic Transcript Sequence
atgcactcctctgccctcttgtgttgtctggtgcttctgactggggttagggctagccctggacagggtacccagagtgagaattcttgcacacacttcccgggaaatctccccaacatgttgagagacctgcgggatgccttcagtcgagtgaaaacatttttccaaatgaaggatcagctggacaacctgctgctgaaagagtcactgttagaagactttaaaggatacctgggttgccaggccctttctgagatgatccagttctaccttgaggaggtgatgccccaggccgagaaccaggaccccgatatcaaggcgcatgttaactcactcggggagaatctaaagaccctgcgtctgcggctacgtcgctgccatcgtttcctgccctgcgagaataaatccaaggcagtggaacaggttaaaaacgcattcaacaagctgcaggagaagggaatatacaaagccatgtccgagtttgatatttttatcaattatatcgaggcttatatgactatgaaaatccggaat

SEQ ID NO: 443 - DNA, 534 bp, Artificial Sequence
  Description of Artificial Sequence: Synthetic Transcript Sequence
atgcactcctcggccttgttgtgttgtctggtgctccttactggtgtgcgggcgtcacccggacagggaactcaatccgaaaatagctgtactcattttccaggaaatctccctaacatgctgcgggacctgcgtgatgcattttctagggtcaaaacgttctttcaaatgaaggatcagctcgacaacctccttctgaaggaaagccttcttgaagatttcaaaggctacttgggctgccaagcgcttagcgagatgattcagttttaccttgaggaagtaatgcctcaggccgagaaccaagatccagacattaaggcacacgtcaattctctcggggaaaatctgaaaactctgagacttcgactgaggcgctgccatagatttcttccttgtgaaaacaagtccaaagcagtggaacaagtgaagaacgccttcaataagttgcaagagaaaggaatctacaaggcaatgtcggaatttgacatattcatcaactacatagaggcttatatgacgatgaaaattcgaaac

SEQ ID NO: 444 - DNA, 534 bp, Artificial Sequence
  Description of Artificial Sequence: Synthetic Transcript Sequence
atgcatagcagcgccctgctgtgttgtctggtgctcctgaccggggtgagagcctccccgggccagggtactcaatccgaaaattcctgcacacatttccccggcaaccttccgaacatgttgcgcgatctcagagatgcctttagcagggtgaagacattcttccagatgaaggatcagcttgacaacttgctgctgaaagagtctctgcttgaggatttcaagggatacctgggatgtcaagcactgagtgagatgatccagttttacctcgaggaggtgatgccccaagcagagaatcaggaccctgacataaaagctcatgtaaattccctgggcgagaacttgaagacactgaggttgcgcctgcgaaggtgtcacagattccttccatgcgagaataaaagcaaggccgtggaacaagtgaaaaacgcatttaacaagctgcaggagaaggggatctacaaagccatgtctgagtttgatattttcatcaattatattgaggcctatatgaccatgaaaattaggaac

SEQ ID NO: 445 - DNA, 534 bp, Artificial Sequence
  Description of Artificial Sequence: Synthetic Transcript Sequence
atgcatagcagtgctttgttgtgctgtctggtgttgctgacgggcgtgcgtgcctctcccggtcagggcacccaatcagaaaactcttgtacacattttccaggcaacctgccaaacatgctgcgcgacctacgcgatgcattctcgcgcgtaaagacttttttccagatgaaagaccagctagataacctgctcttgaaggagtcgcttctggaggacttcaagggatatctggggtgccaggctcttagcgaaatgatacaattttacctggaggaggttatgccccaggcggagaaccaggatcccgacattaaagctcatgtgaatagccttggcgagaaccttaagaccctgaggttaaggttgagacgttgccaccgctttctaccatgcgagaacaagtccaaggccgtggaacaggtgaagaacgcgttcaacaagctccaggaaaaaggaatctacaaggccatgagcgaatttgatatttttattaactatatcgaggcttacatgactatgaaaatacgcaat

SEQ ID NO: 446 - DNA, 534 bp, Artificial Sequence
  Description of Artificial Sequence: Synthetic Transcript Sequence
atgcattccagcgcactcttgtgttgcctggtgctgctcaccggtgtccgggcctccccggggcagggaacccagagcgaaaactcgtgcactcacttcccaggaaatctgcccaatatgctccgcgacctgagggacgcgttctcccgggtgaaaaccttcttccaaatgaaggaccaacttgataaccttctgctcaaggagtcgctgctggaggatttcaagggatacctcggctgtcaggctttgtctgaaatgatccagttctacttggaggaagtgatgccgcaagccgagaaccaggacccggatatcaaggcacacgtcaactcgctcggcgaaaacctgaaaacgctgcgcctgagactgagacgatgccatcggtttctcccttgcgaaaacaagtcaaaggctgtggaacaagttaaaaacgcctttaataagctgcaggagaagggaatctataaggccatgtcagagttcgacatttttatcaattacatcgaagcgtacatgactatgaaaatccgcaac

SEQ ID NO: 447 - DNA, 534 bp, Artificial Sequence
  Description of Artificial Sequence: Synthetic Transcript Sequence
atgcattcttccgcgctgctgtgctgtttggttctgttgacaggagtgcgggcgtcccctggccagggcacccaatctgaaaactcatgtacacattttcccgggaacttgccaaatatgctccgagacctgcgggacgccttttcccgggttaagaccttcttccagatgaaagatcagctagacaaccttctactgaaggagtctctactcgaggacttcaagggctacttgggctgtcaggccctgtcagagatgattcagttttacctggaggaggttatgccccaggcagaaaatcaggaccccgacatcaaagctcatgttaattcgttgggagagaacctgaagactttaaggctcaggctacggcgctgtcatcggttcctgccatgcgagaacaagtcgaaggccgtggagcaggtgaaaaatgcattcaataagctgcaggagaagggcatctacaaggctatgagcgagtttgacatcttcatcaactacatagaagcatacatgactatgaaaattcggaac

SEQ ID NO: 448 - DNA, 534 bp, Artificial Sequence; identical to SEQ ID NO: 433
  Description of Artificial Sequence: Synthetic Transcript Sequence

SEQ ID NO: 449 - DNA, 534 bp, Artificial Sequence
  Description of Artificial Sequence: Synthetic Transcript Sequence
atgcattcctccgctctgctgtgctgcctagtactcttgactggagttcgggcctccccaggacagggaacacagagtgaaaattcatgcacacacttccccgggaatctccctaatatgctgagggacctgcgggatgccttcagtcgcgtcaagactttctttcagatgaaagatcagctagataacctccttctaaaagaaagtctactagaagattttaaaggatacctggggtgccaggctctgtctgagatgatacagttttatctagaagaggtgatgccacaagctgaaaatcaggatccagatataaaagctcacgttaatagtctgggagaaaatcttaagactcttagactgcgcctcaggagatgccaccggttcctgccttgtgaaaacaaatccaaagccgtggagcaggttaagaatgccttcaacaaactgcaggaaaaagggatttataaagctatgtctgagtttgatatattcattaattacatcgaagcatatatgacaatgaagattcgaaac

SEQ ID NO: 450 - DNA, 534 bp, Artificial Sequence
  Description of Artificial Sequence: Synthetic Transcript Sequence
atgcattcgtccgcactgctttgttgtcttgtgctgcttactggcgtccgggcgagccctgggcaaggaacccaatcggaaaatagctgcacccattttcctggtaacttgccaaatatgcttcgcgatcttagggatgctttcagtcgagtcaagacttttttccaaatgaaggatcagctcgataatctgcttcttaaagagtcgctccttgaagatttcaagggttacctgggttgtcaggcactcagcgaaatgatacagttttatcttgaggaagtcatgcctcaggcggaaaaccaagatccagacattaaggcccatgtgaactcgctcggcgaaaacctgaaaaccctcagacttaggctgcggcgctgtcaccgatttctgccctgcgagaacaagtctaaggctgtggagcaagtgaaaaatgccttcaataaacttcaggaaaagggtatctacaaagctatgagcgaatttgacattttcattaactacatcgaagcatacatgacgatgaagattcggaat

SEQ ID NO: 451 - DNA, 534 bp, Artificial Sequence
  Description of Artificial Sequence: Synthetic Transcript Sequence
atgcactcatcagccctcctgtgctgcctcgtgctgctcaccggtgtgcgggcatctcctgggcagggaactcagagcgaaaactcctgtacccacttcccaggcaatctgccgaatatgctgcgcgatctgcgcgatgccttctcgcgggtgaaaaccttcttccagatgaaggaccaactggacaacctgttgctcaaggaatctctcctcgaagatttcaaaggttacctgggatgtcaggcactttcggaaatgatccagttttacctggaggaggtgatgccacaagccgaaaaccaagacccagatatcaaagcccatgtcaattccctcggggagaaccttaagaccctgcggctgcgattgcgcagatgccacaggttcctgccgtgcgagaacaagagcaaagcagtggaacaggtgaaaaatgccttcaacaagctccaggagaaaggaatctacaaggcgatgtccgagtttgatatcttcattaactatatcgaagcctacatgactatgaaaatcagaaac

SEQ ID NO: 452 - DNA, 534 bp, Artificial Sequence
  Description of Artificial Sequence: Synthetic Transcript Sequence
atgcatagttctgcccttctgtgctgtctggtgctgctgactggggtccgcgcaagtcctggccagggcactcagtcggaaaattcttgtacccatttccccgggaacttgccaaacatgctgagggacctccgggatgctttctcccgggtcaagacttttttccagatgaaggaccagctggacaacctgctacttaaggaatctctccttgaggactttaagggctatctcggatgtcaagcactgtctgaaatgattcaattctatctagaggaagttatgccacaagcagaaaaccaggatcccgatattaaggctcacgtgaactccttgggagagaatctgaaaacattgaggttgagactgagaaggtgtcatcgatttctcccatgcgagaacaaatcaaaggcggtggagcaggtgaagaatgctttcaataaactgcaggaaaaaggcatttataaggccatgagtgaattcgatatcttcattaattacatcgaggcctacatgacgatgaagatcaggaat

SEQ ID NO: 453 - DNA, 534 bp, Artificial Sequence
  Description of Artificial Sequence: Synthetic Transcript Sequence
atgcactcgtcagcactgctttgctgtctcgtgcttttgacgggagttcgtgcatccccaggccaagggactcaatccgagaattcctgtactcattttcctggaaacctgccaaacatgctccgggatctgcgggatgcgttcagcagggtcaagaccttctttcaaatgaaggatcagctggacaatcttctgcttaaggaatcgctgctcgaagatttcaaaggttacttgggatgtcaggcacttagcgaaatgatccaattctaccttgaagaagtgatgccccaagccgaaaaccaagatccagacattaaggcccacgtcaacagccttggcgagaatctgaaaaccttgcgtctcagacttcgcagatgtcatcgcttcctgccttgcgaaaacaagagcaaggcagtggagcaggtgaaaaatgcctttaacaaactccaagagaagggtatttacaaggcgatgtccgaatttgacatcttcataaactatattgaggcttatatgaccatgaagatccgcaat

SEQ ID NO: 454 - DNA, 534 bp, Artificial Sequence
  Description of Artificial Sequence: Synthetic Transcript Sequence
atgcacagttccgccctgctgtgctgtctcgtcctcctgacgggggtgagggcctctcctggccagggcacacagagcgagaattcctgcacgcacttccccgggaatctgcccaacatgttacgggatctgagagacgcattctcccgagtcaaaacatttttccagatgaaagaccagctcgacaacttactgctgaaggaaagcttgctggaggacttcaaggggtacctaggctgccaagctcttagtgagatgatccagttttatctggaggaggttatgccgcaggcggaaaaccaagatcccgacattaaagcacatgtaaattctttgggcgagaacttaaaaactctcagactgcgtttacgaagatgtcacagattcttgccgtgcgagaataaatccaaggcagttgagcaggtgaaaaacgcttttaataagttacaggagaaggggatctacaaggctatgagtgaattcgacatcttcatcaattacatcgaggcctatatgaccatgaagatcaggaac

SEQ ID NO: 455 - DNA, 534 bp, Artificial Sequence
  Description of Artificial Sequence: Synthetic Transcript Sequence
atgcatagctctgcgctcctgtgctgcttggtgctgctgaccggagttcgcgcctcccccggacagggtacccagtcagagaatagctgtactcacttcccgggcaaccttccaaacatgctccgtgacctgcgggatgccttctcgcgcgtcaaaacctttttccaaatgaaggaccaactcgacaacctgcttctgaaggaatctcttctggaggatttcaagggttacttggggtgccaagccttgagcgaaatgatccagttttacctggaagaagtgatgcctcaggcagaaaaccaagacccagacatcaaagctcatgtgaactcacttggagagaatctgaaaactctgcgcctgcggttgcgaaggtgtcacagattcttgccgtgcgagaacaaatcgaaagcagtcgagcaggtgaagaatgctttcaataagttgcaggaaaagggaatatacaaggctatgtccgagttcgatatcttcatcaactatatcgaagcctacatgacgatgaagattcgcaac

SEQ ID NO: 456 - DNA, 534 bp, Artificial Sequence
  Description of Artificial Sequence: Synthetic Transcript Sequence
atgcatagttccgccctcttgtgctgcctggtgctcctgaccggcgtgcgagcttcgccgggccaagggacccagagcgagaattcgtgcacgcacttccctggcaatcttcccaatatgcttagggacctccgagatgccttctcgcgcgtcaagaccttctttcagatgaaggatcaactggataatctgctgctgaaggagagcttgctcgaggacttcaaagggtacctcggttgtcaagcgctgagtgaaatgattcagttttacctggaggaggtcatgccacaagcagaaaatcaggaccccgatatcaaagcgcacgtcaacagtctgggagagaatcttaagacgctgcgcctgcgcttacgccgatgtcacagattccttccgtgcgaaaacaagtcgaaagctgtagaacaggtgaagaacgcattcaataagctgcaggaaaagggaatctataaggctatgtctgagtttgacattttcatcaactacatagaggcctatatgactatgaaaatccggaac

SEQ ID NO: 457 - DNA, 534 bp, Artificial Sequence
  Description of Artificial Sequence: Synthetic Transcript Sequence
atgcactcttcagccctcctgtgctgtctcgtgctcctcactggagttcgcgcgagcccaggacaaggtacacagtctgaaaattcttgtacccattttccagggaaccttcccaacatgctcagagacctgagagatgcatttagccgcgtgaagacctttttccaaatgaaggatcaactcgataacctgctgctgaaagaatccctcctcgaagattttaaaggttacctcggttgccaggcattgtccgaaatgatccaattctacctggaagaagtgatgccccaggctgagaaccaagatcctgatatcaaggcacatgttaactcgctgggcgagaacctaaagacattgaggctgcgcctgagacgctgccatcgttttctcccttgcgaaaacaagagcaaggccgtggagcaggtaaagaatgcttttaacaagctccaggaaaaaggtatttacaaagccatgagtgagttcgacatttttatcaattatatagaggcgtacatgactatgaaaatccggaac

SEQ ID NO: 458 - DNA, 534 bp, Artificial Sequence
  Description of Artificial Sequence: Synthetic Transcript Sequence
atgcattcctccgctctcctgtgctgccttgtgctgctgacaggagttcgggcatctccaggccagggaacacaaagtgaaaactcttgcacacacttcccaggcaaccttccaaacatgctgcgcgacttgcgggacgccttttcgcgggtgaagaccttcttccaaatgaaggaccagctcgacaacctgcttctaaaggagtccttgctcgaagactttaaggggtacctcgggtgtcaggctctttccgagatgatccagttctacttagaggaggttatgcctcaggctgaaaaccaggaccctgacattaaagctcatgtcaattcactgggagaaaatctcaagacactgcgactgcgtttgagaagatgtcaccggttcctgccttgtgaaaacaagagcaaagctgttgagcaggtcaagaatgcttttaacaaactgcaggagaaaggaatatacaaagcaatgtcagagttcgacatttttattaactatattgaagcgtatatgacaatgaagatacggaat

SEQ ID NO: 459 - DNA, 534 bp, Artificial Sequence
  Description of Artificial Sequence: Synthetic Transcript Sequence
atgcactccagtgctctgctgtgttgtttggtgctactaaccggcgttcgggcttctccagggcagggcacccaaagtgagaactcctgcacccatttccctggcaacctgcctaacatgctgagagacttgagagatgccttcagtagagtcaagactttcttccagatgaaggaccagctggacaatctgctgctcaaggaatcactgctcgaagatttcaagggctacttaggatgccaagctctgtccgagatgattcagttttatctcgaggaggtgatgccacaggccgaaaaccaagaccccgacataaaggcccacgtaaactctctaggtgaaaacttgaaaaccctgcgactccgccttcgccggtgccataggtttctgccttgcgaaaacaagagcaaggcagtggaacaagtcaagaacgcctttaacaaattgcaggagaagggaatttataaggccatgagcgagtttgacatctttatcaactacatcgaagcttacatgaccatgaaaattagaaat

SEQ ID NO: 460 - DNA, 534 bp, Artificial Sequence
  Description of Artificial Sequence: Synthetic Transcript Sequence
atgcacagcagcgcattgctgtgttgtctggtgctgctgaccggcgtcagggcgagcccaggtcaaggtactcagagcgagaacagctgtacccattttccgggcaacttgccaaatatgttgcgcgatctacgggacgcattttcacgtgttaaaactttttttcaaatgaaagaccaactcgacaacctgttgctcaaagagtctctgcttgaagactttaagggctatctgggttgccaagcgctgagcgagatgatccagttctatcttgaggaggtgatgccgcaagcagaaaaccaggacccggacatcaaagcccatgtgaatagcttaggtgagaacctgaagaccctgcgcttgcgcctgcgtcgctgccatcgattcctcccttgtgagaataagtctaaagcggtagagcaagtgaaaaacgcgtttaacaagctgcaggagaaaggtatttacaaagcgatgagtgaattcgatatcttcatcaactatattgaagcgtacatgaccatgaagatacgcaat

SEQ ID NO: 461 - DNA, 534 bp, Artificial Sequence
  Description of Artificial Sequence: Synthetic Transcript Sequence
atgcattcatcggcacttctttgttgtttggtgcttcttactggagtccgggccagccctggtcaaggaactcaaagtgagaactcgtgtacccattttccaggcaacctgccaaacatgctccgggatctgcgtgatgcattttcgcgcgtcaagacctttttccagatgaaggaccagcttgacaatcttctcctgaaggaatcgctgttggaggatttcaaaggctacttgggttgtcaggcactcagcgagatgatccaattctacctggaagaagtgatgccccaggcagagaatcaggatccagacattaaagcacacgttaactcgttgggggaaaatctcaagactcttcgccttcgtcttagaagatgccacagattccttccatgcgagaacaaatctaaagccgtggaacaagtgaagaatgcgttcaataagttgcaagaaaagggaatctacaaggcgatgtccgaatttgacatattcatcaactatatcgaagcatacatgactatgaagattcgcaat

SEQ ID NO: 462 - DNA, 534 bp, Artificial Sequence
  Description of Artificial Sequence: Synthetic Transcript Sequence
atgcattcttccgcccttctgtgctgtcttgtgctgctgaccggagttcgtgctagccctggccaggggacccagagcgagaactcatgcacccacttccctggcaatttgcctaatatgctccgagacctgcgtgatgcttttagtcgcgtgaaaactttttttcaaatgaaggaccagcttgacaacctgcttctcaaggaaagcctgctggaggacttcaagggatacctggggtgtcaggcgcttagcgaaatgattcaattctacctcgaggaagtaatgccgcaggcagagaaccaggatccagatattaaagctcacgtgaacagtctgggggagaatctgaagaccctacgcctgcgcctgcggagatgccaccgttttttgccctgtgagaacaagtccaaagctgtggagcaggtgaagaatgcctttaacaagcttcaggagaagggcatctataaggcaatgtcagaattcgacatcttcatcaattacatcgaggcctacatgaccatgaaaatcaggaac

SEQ ID NO: 463 - DNA, 534 bp, Artificial Sequence
  Description of Artificial Sequence: Synthetic Transcript Sequence
atgcattccagcgctttgttgtgctgcctcgttctcctgaccggagtccgtgcgagccccgggcaggggacccaaagtgagaattcctgtacccactttcctggcaacctccctaacatgctccgagacttacgcgatgccttctctcgggtaaagactttttttcaaatgaaagaccagctagacaatttacttcttaaggaaagcctgctcgaggacttcaaaggttaccttgggtgtcaggcgctatctgaaatgatccaattttacttggaggaagtcatgccccaggcggagaatcaggacccagatatcaaggctcacgtgaattccttgggggagaatcttaagaccctgcggctgcgcttgagaagatgtcatcggttcctgccttgcgagaacaagagtaaagctgtggagcaagtgaaaaatgccttcaacaaacttcaggagaagggaatctacaaagccatgagtgaattcgatatctttataaactatattgaggcatacatgacaatgaaaatcaggaat

SEQ ID NO: 464 - DNA, 534 bp, Artificial Sequence
  Description of Artificial Sequence: Synthetic Transcript Sequence
atgcatagcagcgctctgctctgctgcctggtgttgctgaccggcgtgagggcatctccggggcaagggacacagagcgagaattcttgtactcattttcccggcaatctgccaaacatgctccgagacctgcgcgatgcgttctctcgtgtcaagacttttttccaaatgaaagatcagttggacaatctccttttaaaagaatccctgctggaagattttaagggctacctggggtgccaagccctgtctgaaatgattcaattctatctggaagaggtaatgccacaggcggagaatcaggaccccgatatcaaagctcacgtgaactcccttggggaaaatctcaaaactctgcggctaaggttgcgacgttgccatcgcttcctgccctgcgaaaacaaaagtaaagccgtcgaacaggttaaaaacgcgtttaataagctgcaggagaagggtatctataaagccatgagcgaattcgacatttttattaactatatcgaggcgtatatgacgatgaaaatccgcaat

SEQ ID NO: 465 - DNA, 534 bp, Artificial Sequence
  Description of Artificial Sequence: Synthetic Transcript Sequence
atgcattctagcgctctcctctgttgcctagtgctgcttacgggagtgagagcgtctcctgggcagggcactcagtctgaaaatagctgtacccactttcccgggaaccttcctaatatgttgagggacctgcgggatgcattctctagggtgaagaccttcttccaaatgaaggaccagttagacaacttgctcttgaaagaatcccttcttgaagactttaaaggttaccttggctgccaggccctctccgagatgatacagttctatctggaagaagtgatgccccaggccgaaaatcaggatcccgacatcaaagctcacgttaacagcctgggtgaaaacttgaaaaccctgcgcctcaggctcagacgatgtcacagatttctgccctgtgagaacaagtctaaagccgttgagcaggtcaaaaatgcatttaacaaactccaggagaaaggaatttacaaggcaatgagcgaattcgacatttttatcaattacatcgaggcctatatgaccatgaagatacgcaac

SEQ ID NO: 466 - DNA, 534 bp, Artificial Sequence
  Description of Artificial Sequence: Synthetic Transcript Sequence
atgcattcaagcgcactcctgtgttgccttgtcctgctgacgggggtgagggcatcccccggtcagggcactcaatcggagaactcttgtacgcatttccccgggaatctcccaaacatgctgcgggacctcagagatgctttctcccgggtcaagaccttttttcaaatgaaggatcaactggataatctgctgttgaaagagtccctgcttgaggactttaagggatatcttggttgtcaggcactttcggagatgatccaattctaccttgaagaagtcatgccccaggcagagaaccaagatcctgacatcaaggcccatgtgaactcgcttggagagaatctcaagactctgcgcttgcgtctgagacgatgtcatcggttcctcccatgtgagaataagtcaaaggcagtggaacaagtgaagaacgcgtttaacaaacttcaggaaaagggaatttacaaggcaatgtcggagttcgacatcttcatcaactatattgaagcatacatgaccatgaagattagaaac

SEQ ID NO: 467 - DNA, 534 bp, Artificial Sequence
  Description of Artificial Sequence: Synthetic Transcript Sequence
atgcactcgtctgcacttctctgctgtttggtattactgaccggggttcgagcatcccccggacaggggacccagtccgagaactcatgcacacattttcctggtaacctgcccaacatgttacgcgacctgcgcgatgcgttttcaagggtgaagaccttcttccagatgaaggatcagttagacaacctgctcttgaaagaaagtttgctcgaagattttaagggatacctcggctgccaggccttgtcagaaatgattcagttttacctcgaagaggttatgccacaggccgagaaccaagatcccgacataaaagctcacgtaaactcgttaggggaaaacctgaaaacattgcggcttagactaaggagatgccatcggttcctgccatgcgagaacaagagcaaagcggtcgagcaagtcaagaacgcctttaataaacttcaagagaagggtatttataaagctatgagtgagtttgacatattcatcaattacatagaagcgtatatgacaatgaaaatcagaaac

SEQ ID NO: 468 - DNA, 534 bp, Artificial Sequence
  Description of Artificial Sequence: Synthetic Transcript Sequence
atgcactcaagcgcactcctttgttgcctcgtcctgctgacaggcgtgcgggcttctcccgggcaaggaacacagtctgaaaattcttgtacacactttccaggcaaccttccaaacatgttgagagatctgcgtgacgcttttagcagggtcaaaacttttttccagatgaaagatcagctggataaccttttgctaaaggagtccctactggaagactttaagggctatttaggatgtcaggcactgagtgagatgattcagttttacctggaggaagtgatgcctcaggctgagaatcaagatcccgatataaaggcacatgtaaacagtctcggcgagaacctgaagacactgcgtctgcggctgcggaggtgccatcggttcctaccatgcgaaaataagagtaaggctgtggagcaggtgaagaacgccttcaacaaattgcaggagaagggcatctataaagcgatgtctgaatttgatatctttatcaattatattgaagcttatatgacaatgaaaatacgcaat

SEQ ID NO: 469 - DNA, 534 bp, Artificial Sequence
  Description of Artificial Sequence: Synthetic Transcript Sequence
atgcattcttctgctttattatgttgtcttgttcttttgacgggagttcgagcatctccaggacaaggaactcaatctgaaaattcatgtacacattttccaggaaatctaccaaacatgttaagggaccttagagatgcatttagtcgagttaaaacattttttcaaatgaaagatcaattagataatttattattgaaagaatcattacttgaagactttaagggatatcttggttgtcaggctttatctgaaatgatacaattttatttagaagaagttatgccacaagctgaaaatcaggatccagatattaaagcacatgttaatagtttaggagagaatttaaaaacacttagattaagattaagaagatgtcatagatttttaccatgtgaaaataaatctaaagctgttgaacaagttaaaaatgcttttaataaattacaagaaaaaggaatttataaagctatgagtgaattcgatatctttatcaattatatagaagcatatatgacaatgaaaattagaaat

SEQ ID NO: 470 - DNA, 534 bp, Artificial Sequence
  Description of Artificial Sequence: Synthetic Transcript Sequence
atgcattcctcggcactgctttgttgtctcgtgctgctgactggggtccgcgcatcgccaggacagggaacgcagtccgaaaacagctgcacccattttcccggaaatctgccgaatatgcttagagatctgcgagatgctttttcccgcgttaagacttttttccagatgaaggaccaattggacaatcttttgcttaaagagtcgcttctggaggactttaaaggctacctgggatgtcaagccctttcagaaatgattcagttctatctggaagaggtgatgccccaggcagaaaaccaagatcctgatatcaaggcacatgtcaattccctgggtgaaaatctgaaaaccttgaggcttcggcttcggcggtgccacagatttcttccttgcgaaaacaagtcgaaggcggtggaacaggtgaaaaacgcgttcaataagctgcaggagaagggcatctacaaggcaatgtctgaattcgacattttcatcaattacatcgaggcctacatgaccatgaagattagaaac

SEQ ID NO: 471 - DNA, 534 bp, Artificial Sequence
  Description of Artificial Sequence: Synthetic Transcript Sequence
atgcattcatctgcccttctttgttgcctcgtgctactaacaggtgtgagagcctcgccaggtcaggggacacagtcagagaactcatgtacgcacttccctggtaacctgcctaacatgctgcgtgatctgcgggacgcttttagtagagttaaaacctttttccaaatgaaagatcagctggacaatttgctgctaaaagagagtctgttggaagactttaaaggctatctgggctgccaggcattgtccgagatgattcagttctatctggaggaagtgatgccgcaggccgaaaaccaggatccagatattaaagctcacgtgaatagtctgggtgagaatttaaaaaccctgcggctgagattgaggaggtgtcatcgatttcttccttgcgaaaataaatctaaggctgtggagcaggtcaagaatgcctttaacaagctgcaagaaaaggggatttacaaagctatgagcgagtttgacatttttatcaactacattgaggcctatatgactatgaaaattcgcaat

SEQ ID NO: 472 - DNA, 534 bp, Artificial Sequence
  Description of Artificial Sequence: Synthetic Transcript Sequence
atgcactcgagcgccctgctttgctgcctcgtgttgctcacaggggtgagagccagccctgggcaggggacccagagtgaaaattcctgtacgcacttccccgggaatctgcccaacatgctgcgggacttaagagatgcctttagtcgcgtcaagaccttcttccaaatgaaagatcagctggacaacctgctgcttaaagaatcactcctcgaagatttcaaagggtatctaggctgccaagccctgtcagagatgattcagttttatctcgaggaagtaatgcctcaggccgagaatcaggacccagatataaaagcgcacgtcaacagcctgggggagaacttgaaaactctgcgcttacgcctaagacgttgtcatcgcttccttccgtgcgagaacaaaagcaaagcagttgagcaggtaaagaacgcattcaacaagttgcaggagaagggcatctataaggcaatgtctgagtttgacatatttatcaactacatcgaggcatatatgaccatgaaaattcgcaac

SEQ ID NO: 473 - DNA, 534 bp, Artificial Sequence
  Description of Artificial Sequence: Synthetic Transcript Sequence
atgcattcatccgccctgctgtgctgcctggtccttctcacgggagtgcgggcttctcccggccaggggactcagtcagagaattcgtgcacccatttccctggaaacctgccgaacatgctgagggacttgcgcgacgccttttcaagagtgaaaacttttttccaaatgaaagaccaactggacaatctgttgctcaaagaatccctgttggaggacttcaagggatacttgggatgccaggcgctgtcagagatgatccagttttacctcgaagaggtgatgccacaggcggaaaaccaagacccagacatcaaggcacacgtcaatagcctgggggaaaatcttaagaccctgcgcctccgcctgcggcgctgccaccgctttctgccgtgcgaaaacaaatcaaaagctgtggagcaggtgaagaacgcctttaacaagctccaggaaaagggaatctacaaggccatgtcggaattcgacattttcatcaactatattgaggcgtatatgacgatgaaaatccggaac

SEQ ID NO: 474 - DNA, 534 bp, Artificial Sequence
  Description of Artificial Sequence: Synthetic Transcript Sequence
atgcactcaagtgccctgctgtgctgccttgtgctgctgaccggggtgcgcgctagccctggacaaggcacacaatccgagaacagctgcacacactttcccggtaatctgcccaacatgttaagagaccttagggatgctttttctcgcgtgaagaccttctttcagatgaaagaccagcttgacaatctgctgctgaaagagtctctcttggaagattttaaagggtaccttggttgccaggctctgtctgaaatgatccaattctacctggaggaggtgatgccccaggcggaaaatcaggatcccgacatcaaggcccacgtcaacagtttgggcgagaacctgaagacactgcggcttcgacttcgcagatgtcacagatttctgccgtgtgaaaacaagtcaaaagctgtggaacaggtcaagaacgcatttaacaagctgcaggagaagggtatttataaagctatgagtgagtttgacatctttataaactacatagaggcatacatgactatgaagattcgtaac

SEQ ID NO: 475 - DNA, 534 bp, Artificial Sequence
  Description of Artificial Sequence: Synthetic Transcript Sequence
atgcactcatctgcactgctgtgctgtctcgtcctgttgacaggcgttagagcgagcccaggacagggaactcagagcgagaattcatgcacacatttcccgggcaacctgccaaacatgctaagagacctgcgggatgccttctctagagttaagactttctttcagatgaaagatcagctggacaaccttttgcttaaggagagtttgctggaggacttcaaaggttatctaggctgtcaagccctctccgaaatgatccagttctatctggaagaggtgatgccacaggcagagaatcaggaccctgatattaaagcgcacgtcaactccttaggagaaaatctgaaaacactccgattgaggctgcgccggtgtcaccggtttctcccatgtgagaacaaatccaaggctgtggaacaagtgaaaaatgcctttaacaagctgcaagagaagggaatctacaaggccatgagcgagtttgacatttttattaattatatcgaggcgtatatgactatgaaaatccgtaat

SEQ ID NO: 476 - DNA, 534 bp, Artificial Sequence
  Description of Artificial Sequence: Synthetic Transcript Sequence
atgcattcctccgcccttctctgttgcttggtgctcctgactggagtcagggcatcgcctggtcagggcacccaatccgagaattcctgcactcattttcccggcaacctccctaacatgctgcgagatcttcgcgatgcattttcaagagtcaagaccttttttcagatgaaggatcagctcgataaccttctccttaaagaatccctgctggaggactttaagggttacctgggttgtcaggccctctcggaaatgatccagttttatctggaagaagtgatgcctcaagcagaaaaccaggatccagacataaaggcacacgtgaactctctgggcgagaatctgaaaacccttagattgcgccttagaaggtgtcatagattcctgccttgtgagaacaagtccaaagccgtggaacaggtcaagaacgcattcaacaaacttcaagaaaaaggaatctacaaggccatgtcggagtttgacattttcattaactacattgaagcatacatgaccatgaagatccgtaac

SEQ ID NO: 477 - DNA, 534 bp, Artificial Sequence
  Description of Artificial Sequence: Synthetic Transcript Sequence
atgcactcttccgctctgctgtgctgcctggtcttgctaacgggcgtacgggcctccccgggtcagggcacgcaatctgaaaattcgtgcacccatttccccggcaacctgcccaacatgctccgtgacctgcgtgacgctttttctcgggtgaagaccttcttccagatgaaggaccaattggacaacctcctgcttaaggaaagtctgttggaagatttcaaggggtatctgggatgccaggcactatctgagatgatacagttctacctcgaggaggttatgccgcaggcagagaaccaagaccccgacattaaagcccacgtcaactcgctgggagagaatctaaagacgctgcgcctccgcctgcgcaggtgccaccgattcctgccatgcgagaacaagtccaaggcggttgaacaggtgaaaaacgccttcaataaattgcaggagaaaggcatttacaaggccatgtccgagttcgatattttcatcaattatatcgaggcctatatgaccatgaagatcagaaat

SEQ ID NO: 478 - DNA, 534 bp, Artificial Sequence
  Description of Artificial Sequence: Synthetic Transcript Sequence
atgcactcttccgccttgctgtgctgccttgtgttactcacaggagtgcgggcatctcccgggcagggcactcagtccgagaacagctgtactcacttccctggcaatctccccaacatgctgagagacctgagggacgctttctcaagggtaaagaccttctttcagatgaaggatcagctggacaacctcctgctgaaggagagcctgctcgaggactttaaaggctacctgggctgccaggctctgtccgagatgattcagttctatttagaagaggttatgcctcaagcggagaatcaggacccagacatcaaagctcacgtcaacagtcttggcgagaatctgaagactctgagactccgcctgcgacggtgtcatcgcttcctgccatgcgaaaataagtcaaaggccgtcgaacaagtaaagaatgcctttaacaagctgcaggagaaaggcatctataaggcaatgtctgaattcgacatatttataaattatattgaggcctacatgacaatgaagatacgcaat

SEQ ID NO: 479 - DNA, 534 bp, Artificial Sequence
  Description of Artificial Sequence: Synthetic Transcript Sequence
atgcatagctcggcattgctctgttgcctcgtgctgctgaccggggtccgcgcgtcccctggtcaaggaactcaatccgaaaactcctgcactcattttcctggtaacctcccaaacatgctgagggatctgcgcgacgcattttccagggttaagacctttttccagatgaaggatcagctggataatctcctgctgaaggaatcgcttctggaggacttcaagggatacttgggttgccaggcactcagcgaaatgatccagttttacctcgaagaagtcatgccccaagctgagaaccaagaccccgatatcaaggcccatgtcaactcacttggagaaaacctcaagacccttagacttaggttgaggagatgtcacagatttctcccttgtgagaacaagtcaaaggcagtggagcaagtgaaaaatgcttttaacaaactccaagaaaaggggatttacaaagccatgagcgaatttgacattttcatcaattacatcgaagcctacatgactatgaaaatcaggaac

SEQ ID NO: 480 - DNA, 534 bp, Artificial Sequence
  Description of Artificial Sequence: Synthetic Transcript Sequence
atgcattccagtgccctgctctgctgccttgtcctcctgaccggtgtgcgggcgtcgccgggtcaagggacgcagagcgaaaactcctgtactcactttccgggtaatctgcctaatatgcttcgggacttgagggatgcgttctcccgtgtgaaaaccttctttcaaatgaaagatcaactcgataaccttctcctgaaggaatcattgctggaggatttcaagggatacctgggatgccaggcgctctccgaaatgattcagttctaccttgaagaggttatgccacaggcagaaaatcaagaccccgacatcaaggcccacgtgaattcgctgggagagaatttgaaaaccctgcgcctgcgactgagacgctgccatagattcctgccgtgtgagaacaaatcgaaggccgtggaacaggtgaaaaacgctttcaacaagctgcaggagaaagggatctataaggcgatgtcggaattcgacattttcatcaactacatcgaggcttacatgactatgaaaatccggaac

SEQ ID NO: 481 - DNA, 534 bp, Artificial Sequence
  Description of Artificial Sequence: Synthetic Transcript Sequence
atgcactcgtcggcgctcctttgctgtctcgttctgctgaccggagtgagagcgtcaccaggacagggcacccaatctgagaactcatgcactcacttcccgggaaatctccccaatatgctgcgcgatctgcgcgacgccttttcgcgcgtcaaaaccttcttccagatgaaggaccaactggataacctgcttttgaaggagtcgctgttggaggacttcaagggctacctgggatgtcaggccctcagcgagatgattcagttttatcttgaagaagtgatgcctcaggccgaaaaccaagaccccgatatcaaggcacatgtgaattcactgggcgaaaatctgaaaaccctcagactgcgactgcggcgctgccatcgctttcttccgtgcgagaacaagtcaaaggccgtggagcaagtcaagaacgccttcaataagctccaggaaaaaggaatttacaaagctatgtccgaattcgacatcttcataaactacatcgaagcatacatgactatgaaaatccggaac

SEQ ID NO: 482 - DNA, 534 bp, Artificial Sequence
  Description of Artificial Sequence: Synthetic Transcript Sequence
atgcatagttctgccctgctgtgttgtctagtgttgctgacaggagtgcgcgcttctcctggtcaaggcactcaatccgagaattcctgtactcattttcccggcaatctgcctaatatgcttcgggatctacgagacgctttctcgcgggttaagacgttcttccaaatgaaagatcaactagacaatctgctcctcaaggagtcgctgctggaagatttcaaggggtatctgggctgtcaggcacttagtgagatgatccagttctacctggaggaagtaatgccccaagcggaaaatcaggatcccgatatcaaggcacatgtgaacagcctaggagaaaacctcaaaaccctgcggttaagattgcgtcgctgtcacaggtttctaccgtgcgagaataagagtaaggccgtcgagcaagtgaaaaatgcctttaacaagctgcaggaaaaaggaatctataaagccatgtccgagtttgacatcttcatcaactacatcgaggcttatatgaccatgaagattcggaat

SEQ ID NO: 483 - DNA, 534 bp, Artificial Sequence
  Description of Artificial Sequence: Synthetic Transcript Sequence
atgcacagcagcgctctcctgtgctgtctggttctgctgaccggagtccgcgcatcgccaggtcaaggtactcaaagcgaaaactcttgcacccactttccgggaaacctgcctaacatgctgcgggatctgcgggatgctttctcccgagtaaagacgttcttccaaatgaaagatcagctggacaacctgctcctgaaagagtcgctgctggaggactttaagggatacctgggctgtcaggccctctccgaaatgatccagttctacctcgaagaggtgatgccgcaggccgaaaatcaagacccggacatcaaggcccacgtcaactcactgggagaaaacttgaaaactctgcggctccgcttgaggagatgccaccggtttctcccctgcgaaaacaagtccaaagcggtggagcaggtgaaaaacgccttcaacaagctccaggagaagggaatctacaaagcgatgtcggaattcgacatcttcatcaattacattgaggcctacatgactatgaaaatcaggaat

SEQ ID NO: 484 - DNA, 534 bp, Artificial Sequence
  Description of Artificial Sequence: Synthetic Transcript Sequence
atgcattcgtctgctttgttgtgttgtctcgtgttgctaaccggggtgagggcatcccctggacagggtacacagtcagagaattcctgcacacatttcccaggaaacctccctaatatgttaagggacctccgagatgctttcagtcgagtgaagaccttttttcaaatgaaagatcagcttgataatctgcttcttaaagaatctctcttggaagatttcaagggatacttgggatgtcaagctctttcagagatgattcagttctatttagaagaggtgatgccacaagcggagaatcaagatccagacattaaggcgcatgtaaactccttgggtgaaaatttaaagactctcaggcttagacttcgaaggtgtcatcgattccttccttgcgagaacaaatccaaagctgttgaacaggtcaagaatgctttcaacaagctccaagagaagggcatttataaggctatgtctgaattcgatatctttatcaactatatcgaagcttatatgacgatgaagattcggaat

SEQ ID NO: 485 - DNA, 534 bp, Artificial Sequence
  Description of Artificial Sequence: Synthetic Transcript Sequence
atgcattcgtcagctcttctttgttgcctggtgttgttgactggcgtgcgcgcatctccaggacaaggaactcagagcgagaactcatgtacccatttccccggtaatcttccaaatatgctgagagatctgcgtgacgcgttctcaagagtcaagaccttttttcaaatgaaggatcaacttgataacctcttgctgaaggaaagccttttggaagatttcaagggttacctggggtgccaggccttgtcagaaatgatccaattctacctggaggaagtcatgccacaagcggagaaccaggatccggacattaaggctcatgtcaactccctgggagaaaatcttaagactctcagactgcgcctgcggcgttgccacagatttctgccctgtgagaacaagtccaaggccgtggaacaagtgaaaaacgcgttcaataagctgcaggagaaggggatatacaaggcaatgtccgaatttgacattttcattaactacatagaagcatacatgactatgaagatccggaac

SEQ ID NO: 486 - DNA, 534 bp, Artificial Sequence
  Description of Artificial Sequence: Synthetic Transcript Sequence
atgcattctagcgctctgctctgctgtctcgtgctgttgactggagtccgcgcatccccaggacagggtacccagagcgaaaacagctgcacccacttcccaggaaatcttcccaacatgctgcgtgatctgcgcgatgctttttcccgcgtgaagacttttttccagatgaaggaccaactggataatttgctgcttaaggagtccctcctcgaggactttaagggttatctgggatgtcaagccctgagcgagatgattcagttttacctggaggaggttatgcctcaggctgagaatcaggacccagatatcaaggctcacgtaaattctcttggcgagaatctgaagactctgaggctcaggctcagaagatgtcaccgctttctcccttgcgagaacaaaagtaaggctgtagagcaagtcaaaaatgctttcaacaagttgcaggagaagggaatctacaaagccatgtctgaatttgatatttttattaactacattgaagcttacatgactatgaagataaggaat

SEQ ID NO: 487 - DNA, 534 bp, Artificial Sequence
  Description of Artificial Sequence: Synthetic Transcript Sequence
atgcattcttcagcgctgctgtgctgccttgtgctgctgaccggtgtgagagcctcccctggacagggaacacaaagtgagaattcatgtactcactttccaggaaatctgccgaacatgctgcgtgacttgcgcgatgcgttttctagagttaaaacctttttccagatgaaagatcaattggacaatctgctcctgaaggaatcacttctggaggactttaaagggtacctgggttgtcaagctttgtccgagatgatccagttttacctcgaggaagtgatgccacaagcagagaaccaggaccccgatattaaggctcacgttaacagtctgggggagaaccttaagaccctgcgtctgcgcctccggaggtgccaccggtttctgccatgcgagaacaaatcaaaggccgttgaacaggttaaaaacgcattcaataaactacaagaaaaggggatttacaaggccatgtccgaattcgacattttcatcaactatattgaggcatacatgactatgaagattcgcaat

SEQ ID NO: 488 - DNA, 534 bp, Artificial Sequence
  Description of Artificial Sequence: Synthetic Transcript Sequence
atgcattcctccgcgttgctgtgctgcctcgtgttgctcactggcgtgcgcgcgtcgcctggccagggtactcaaagcgaaaattcctgtactcactttccggggaacctcccgaacatgctgcgtgacctccgggacgccttcagccgcgtgaaaaccttcttccagatgaaggatcagttggacaacttgcttttgaaggagtcacttctggaagatttcaagggatacctgggatgccaagccctgtcagaaatgatccagttttacttggaggaagtgatgccacaggcggaaaatcaggatccggacatcaaagcccatgttaactcgctgggggagaatctcaaaactctgagacttcgcctgcggcggtgtcacagattcctgccatgcgagaacaagtcaaaggctgtcgagcaggtgaaaaacgcctttaacaagctgcaagaaaaggggatctacaaggcaatgtcggaattcgatatctttatcaattacatcgaagcatacatgaccatgaagattcggaac

SEQ ID NO: 489 - DNA, 534 bp, Artificial Sequence
  Description of Artificial Sequence: Synthetic Transcript Sequence
atgcactcatctgccctcctatgttgcttggtgcttcttactggagtacgagcaagccctgggcagggtactcagtccgagaactcatgcacccacttcccaggaaacctccctaacatgctgagagacctccgcgacgcattttcgagagtgaagactttttttcagatgaaggaccagctggacaacctcctactgaaggagtccctactggaagactttaagggctacctaggatgtcaggccctaagcgagatgatccagttctacctggaggaagttatgccacaggcagagaaccaagatccagacatcaaagcacacgtgaacagcctgggggaaaatcttaagaccctacggttgagactgcgcagatgtcaccgattcctcccttgtgaaaataagagcaaggccgtcgagcaggtcaagaacgcattcaataaactgcaggagaaagggatatataaagccatgagtgaattcgacatattcatcaactacatcgaggcttatatgaccatgaaaattagaaat

SEQ ID NO: 490 - DNA, 534 bp, Artificial Sequence
  Description of Artificial Sequence: Synthetic Transcript Sequence
atgcatagctcggccctgctgtgttgtctcgtcttgctcacgggcgtccgcgctagtcctggacaaggtactcaatctgagaattcgtgcacgcatttccccggtaatttgcctaacatgcttagggacctccgggatgcctttagcagggtgaagactttcttccagatgaaagaccaactcgacaatcttctgctaaaagaatctctgttggaagattttaaaggttacctgggttgccaggctttgtccgaaatgatacagttttacttagaggaagtcatgccccaggccgaaaaccaggaccccgatatcaaggcccacgtgaattcacttggcgagaacctgaagacgcttcgactgcgactgaggcgttgccatcgattccttccttgcgaaaacaagtcaaaggccgtggaacaggtcaagaatgcgtttaacaaactccaagagaaaggtatatataaagctatgtcggaatttgatattttcataaactacattgaagcttacatgacaatgaaaataagaaat

SEQ ID NO: 491 - DNA, 534 bp, Artificial Sequence
  Description of Artificial Sequence: Synthetic Transcript Sequence
atgcattcgtccgcactcctctgctgcctggtgctcctcactggtgtacgcgcaagccctggccaaggtacccagagcgagaactcctgcactcacttcccgggaaacctcccaaacatgttgcgcgatctgcgggacgctttctccagggtcaagacgttcttccaaatgaaggatcagctcgacaatttgctgctgaaggaatcactgctcgaggactttaagggctacttgggatgccaggctttgtcagagatgatacaattctatcttgaagaagtgatgccccaagcggagaatcaggacccagatatcaaggcccacgtcaacagcctgggagaaaatctgaaaaccctgcggctccgtttgcgcagatgtcatagattcctgccgtgtgaaaacaaatcgaaagcagttgaacaggtgaagaacgccttcaacaagttgcaggagaagggaatttacaaagcgatgtcagaatttgatatctttatcaactacatcgaggcatacatgactatgaaaatccggaat

SEQ ID NO: 492 - DNA, 534 bp, Artificial Sequence
  Description of Artificial Sequence: Synthetic Transcript Sequence
atgcattcatccgcactgctttgttgtcttgtgctgctcaccggtgtgagagcatcgccagggcagggtacccagtcggaaaactcatgcacccattttcctggaaaccttccaaacatgcttagagatttgcgggacgcattttcgagagttaagactttctttcagatgaaggaccagctggataaccttctgcttaaggaaagcctgctggaggatttcaagggttacctcggatgccaggccctctcggagatgattcagttctacctcgaagaagtcatgccgcaagccgaaaaccaagatcctgatatcaaggctcacgtgaattcgcttggagagaacctgaaaacgctgcggttgcgtttgcgccgctgtcatcggtttcttccatgcgagaataagtccaaggctgtcgaacaggtgaagaatgcattcaacaaactccaggagaaaggaatttacaaagcaatgtcggaatttgatatctttatcaactacattgaggcatacatgactatgaagatacggaac

SEQ ID NO: 493 - DNA, 534 bp, Artificial Sequence
  Description of Artificial Sequence: Synthetic Transcript Sequence
atgcactcctcggcactcctgtgctgcctggtcctgctcactggtgtccgcgcctcccctggtcaaggaactcagtcggagaattcctgcacccacttcccgggcaatctgccaaatatgctgcgcgacctgcgggatgccttcagcagagtcaagactttcttccagatgaaggaccagctggacaacctgcttctgaaggaatcactcctcgaagatttcaagggatacctcgggtgccaggccctgagcgagatgatccagttctacctggaagaagtcatgccgcaagctgagaaccaggacccagacattaaggctcatgtcaattcgcttggagagaacctcaagacgttgagactgcgtctgagacggtgccatcgcttcctgccgtgcgaaaacaagtcaaaggcggtggaacaggtgaagaacgctttcaacaagctgcaggagaaaggaatctacaaagcgatgagcgagtttgacattttcattaactacatcgaggcatacatgaccatgaagatccgcaac

SEQ ID NO: 494 - DNA, 534 bp, Artificial Sequence
  Description of Artificial Sequence: Synthetic Transcript Sequence
atgcattcctccgctctgctctgctgtcttgtgcttctgaccggagtgcgtgcctcacctgggcagggcacccaatccgagaactcttgcactcactttccgggaaacctgccaaacatgctgcgcgatctgcgggacgcgttctcgagagttaagactttctttcagatgaaggaccagcttgataatctgctcttgaaagagtcgctgctcgaagatttcaaaggatacctggggtgccaggcactgtcggaaatgatacagttctatttggaagaggtgatgccacaagccgagaaccaagatcctgacatcaaggcccatgtaaactcactgggtgaaaacctcaagacgctgcggctgcgattgcgccggtgtcacagattcctgccctgtgaaaacaaatcgaaggcagtcgaacaggtgaaaaatgctttcaataagctccaagagaaaggaatctacaaggctatgtcagaattcgacatcttcatcaattacattgaggcctacatgaccatgaagattcgcaac

SEQ ID NO: 495 - DNA, 534 bp, Artificial Sequence
  Description of Artificial Sequence: Synthetic Transcript Sequence
atgcatagctcggcattgctctgctgcctcgtgctcctcaccggagtcagagcatcaccgggacaaggtactcaatcggaaaactcatgtacccattttccaggcaatctgccaaatatgcttagggacctgagagatgccttttcccgcgtcaaaacgtttttccaaatgaaggatcaactggacaatctgctccttaaagagtccctcctcgaagatttcaagggttacctgggatgccaggccctctcggaaatgattcaattctacttggaagaagtgatgcctcaggcggaaaaccaggatccggatatcaaagcacacgtcaacagcctgggggaaaatcttaaaactttgcgcctgcgcctgcgtaggtgccatcggtttctgccgtgtgagaataagtccaaggcggttgaacaggtcaagaatgccttcaacaagctccaagaaaaaggcatctacaaggcaatgtcggagtttgacatcttcattaactacattgaagcgtacatgaccatgaagatccggaac

SEQ ID NO: 496 - DNA, 534 bp, Artificial Sequence
  Description of Artificial Sequence: Synthetic Transcript Sequence
atgcatagctccgctttgctgtgctgcctggttctgttgactggcgtgcgagccagccctgggcaaggaactcagtctgaaaacagctgtacccattttcctgggaacctgcccaatatgttaagggatctgcgtgacgccttcagccgcgttaagaccttttttcagatgaaggaccagctggacaatctcctgctgaaagagagtctgctggaagactttaaaggctacctgggctgccaggccctgtccgaaatgattcagttctacctggaggaagtgatgccccaagccgagaatcaggatcctgatatcaaggcgcacgtgaattccctaggcgaaaacctcaaaacgttgcggcttcgtttaagacgttgccaccggttcctgccctgtgagaataagtccaaagccgttgaacaggttaaaaacgccttcaacaagctgcaagagaaggggatctacaaagcaatgagtgaattcgatatctttataaattatatcgaagcatacatgaccatgaaaatcagaaat

SEQ ID NO: 497 - DNA, 534 bp, Artificial Sequence
  Description of Artificial Sequence: Synthetic Transcript Sequence
atgcattcctccgccctgctttgctgtctggtgttgctgacgggagtgagggcaagccctggccaagggacgcagtcggagaactcatgtactcattttcctggaaaccttcctaatatgctcagagatctgcgtgatgcattttcccgggtcaagaccttctttcaaatgaaagatcagctggataaccttctgcttaaggagtctttgctcgaagatttcaagggatatctcggttgtcaagcactcagcgaaatgattcaattctaccttgaagaagttatgccacaagcagaaaaccaggacccagatatcaaagcacatgttaactcgctgggtgaaaatctgaaaaccttgcgccttaggctccggcggtgtcatcggtttctcccttgcgaaaacaaatcaaaggccgtggagcaagtcaagaacgcgttcaataaactgcaggagaagggtatttacaaagccatgtccgagttcgacatcttcatcaattacattgaagcgtacatgaccatgaagatcaggaac

SEQ ID NO: 498 - DNA, 534 bp, Artificial Sequence
  Description of Artificial Sequence: Synthetic Transcript Sequence
atgcatagctccgctctgctttgttgtcttgtgctgttgacaggggtgagggcttcaccaggccagggtacacaaagtgagaacagttgcacgcatttccctggcaatttgcctaatatgctgagagatctgagagacgcattttctagagtgaagacattctttcagatgaaggatcagctcgacaacttgctgcttaaggagtcccttttagaagacttcaaaggttatctcgggtgccaggcccttagcgagatgattcagttttatttggaggaagtcatgccccaggccgagaatcaggatcctgatatcaaagcacatgtgaatagcctcggcgaaaatttgaaaacactaagactgcgactgagaagatgtcaccgatttcttccatgtgagaacaagtccaaagccgtggaacaagttaagaatgcattcaataagttgcaggaaaaggggatctacaaggccatgtcggaattcgacattttcatcaactatatagaagcctatatgacaatgaagatcagaaac

SEQ ID NO: 499 - DNA, 534 bp, Artificial Sequence
  Description of Artificial Sequence: Synthetic Transcript Sequence
atgcattcgtctgctctgctgtgctgccttgtccttctgacgggcgtccgagcttccccggggcagggcacccaaagcgagaattcctgcacgcactttccaggtaatcttcccaacatgttaagagatcttcgggatgcttttagcagggtgaaaacctttttccaaatgaaggatcagctggacaatttgctccttaaagaaagccttctcgaggacttcaaaggctatctggggtgtcaggccctgtcagaaatgatacagttctacctggaagaggtgatgccacaggccgagaaccaggaccctgacatcaaagctcatgtgaattccctgggcgagaacctgaagactctccgcttgcggctgaggcggtgccaccggtttctgccttgcgagaataagagtaaagctgtcgagcaagtcaaaaacgcattcaacaagctgcaggagaaaggcatttataaggccatgagtgaattcgacatttttattaactacatcgaagcttacatgacaatgaaaatacgaaac

SEQ ID NO: 500 - DNA, 534 bp, Artificial Sequence
  Description of Artificial Sequence: Synthetic Transcript Sequence
atgcactcctctgctctcttgtgctgcttagtcctcttaactggggtgcgagctagtccaggacagggaacacaatccgagaactcctgcacacacttcccaggcaatcttcccaacatgctcagggacttgcgggacgccttcagccgggtgaagaccttctttcagatgaaggaccagttagacaatttattactcaaggagtcactccttgaagatttcaaaggctacttaggctgccaggccctgagtgaaatgatccaattttacctggaggaggtaatgccacaggcagaaaaccaagacccggacattaaagcacatgtaaactcccttggcgagaatctgaagacactgcgattacggctgaggaggtgtcacaggttcctgccctgcgagaacaaaagcaaggccgtggagcaggtcaaaaacgcatttaataaacttcaggagaagggaatttataaggcaatgtccgaattcgacatttttattaattacatcgaagcttacatgaccatgaaaatccgcaac

SEQ ID NO: 501 - DNA, 534 bp, Artificial Sequence
  Description of Artificial Sequence: Synthetic Transcript Sequence
atgcactcttcagctctgctgtgctgccttgtactgctgactggagtacgcgctagccctggccaaggaacacaatccgagaattcttgcacacacttcccaggcaaccttccaaacatgcttcgcgatctgcgcgacgcctttagtcgcgtgaaaaccttcttccaaatgaaggaccagctcgacaacctgcttttgaaggagtccctgctcgaggattttaagggatatctgggatgtcaagccctctcagagatgatccaattttacttggaggaagtaatgccccaagccgaaaaccaagacccggacatcaaagcccacgtcaattcactcggcgaaaatctcaagacattgagactgcgcctgcgcagatgccaccgctttctgccctgcgaaaataagtcaaaagcggtagaacaggtaaagaacgccttcaacaagctgcaggagaaaggcatatacaaggccatgtctgagttcgatatcttcattaactacatcgaagcctacatgactatgaagatccgcaac

SEQ ID NO: 502 - DNA, 534 bp, Artificial Sequence
  Description of Artificial Sequence: Synthetic Transcript Sequence
atgcattcgtcagcccttctttgttgtctcgttcttctcacgggagtgagagcttcgccaggccaaggtacgcaaagcgaaaattcctgcactcactttcctggtaaccttcctaatatgttgcgtgaccttagggacgccttctcgcgggtgaaaacttttttccagatgaaagaccaactggacaaccttctgttgaaggaatcgctgcttgaggatttcaagggatatcttgggtgtcaggccctgagcgaaatgatccagttttacctcgaagaggtgatgcctcaagcagaaaatcaagatccagacattaaggcacacgtcaactcactcggtgaaaaccttaagaccttgcgccttcggctgcgacgctgtcatagatttcttccttgtgagaataagtccaaggcagtcgagcaggtgaagaacgcgtttaacaaactccaggagaaaggaatctacaaagccatgagcgaatttgatatcttcatcaattacattgaggcatacatgaccatgaaaatcagaaac

SEQ ID NO: 503 - DNA, 534 bp, Artificial Sequence
  Description of Artificial Sequence: Synthetic Transcript Sequence
atgcactcgagcgcactgctgtgttgcctggtccttctcacgggcgtcagggcctccccgggacagggtacccagtcagagaattcctgcactcatttcccgggtaatctgcctaacatgctgcgggacctcagagatgcgtttagccgcgtcaagaccttcttccaaatgaaggaccaattggataacctgctgttgaaggaatccctcctggaggacttcaaaggttacctgggatgccaggctctctcggagatgatccagttttacctggaggaagtgatgccacaagcagaaaatcaagatccagacatcaaagcccacgtgaatagtctgggagagaacctgaaaacgctgcggctcagattgagacgctgccaccggttcctgccgtgtgaaaacaagtcgaaggcagttgagcaggttaagaacgccttcaacaagctgcaggaaaaaggcatatacaaggcgatgtctgaattcgatatctttatcaactatatcgaggcgtacatgaccatgaagattcggaat

SEQ ID NO: 504 - DNA, 534 bp, Artificial Sequence
  Description of Artificial Sequence: Synthetic Transcript Sequence
atgcattcctccgccctcctgtgctgcctcgtcttgctcaccggcgtgcgggcatcacctggtcaaggaacgcagtccgaaaacagctgtacccactttcccgggaatctcccgaacatgttgagggacctgagagacgccttctctcgggttaagacgttcttccagatgaaggaccagctggataatctgctgctcaaggagtcgctgctcgaagatttcaaagggtacttggggtgccaggcactgtccgaaatgattcagttctacttggaagaggtgatgcctcaagcggaaaaccaggacccagatatcaaggcgcatgtgaactcgctgggagaaaacctgaaaaccctcagactcaggctgagacggtgccatcggttcctcccgtgcgaaaacaagtcgaaagccgtggaacaggtgaagaatgccttcaacaaacttcaggaaaagggtatctacaaagccatgtcggagttcgatatctttatcaattacatcgaggcctacatgaccatgaaaatccgcaat

SEQ ID NO: 505 - DNA, 534 bp, Artificial Sequence
  Description of Artificial Sequence: Synthetic Transcript Sequence
atgcactcctccgcactcttgtgctgtctggtgctgcttacgggcgtcagagcatcgcctgggcaaggtactcagtccgagaattcgtgtacgcattttcccggcaatctgcccaacatgcttcgtgacctgcgcgatgcattctcaagggtgaaaaccttttttcaaatgaaggatcaactcgacaatctgctgctgaaggagtccctccttgaggacttcaagggatacttgggctgtcaagcccttagcgaaatgatccagttctacctcgaagaggtgatgcctcaagcagagaatcaggatccagacataaaggctcatgtgaattcgcttggagaaaatctcaaaaccctgaggcttagattgcggaggtgtcatcgatttttgccatgcgaaaacaagagcaaggctgtggagcaagtgaagaatgcatttaacaagctgcaggaaaagggtatctacaaggcaatgtccgaattcgatatcttcatcaattacatcgaagcgtacatgactatgaagattaggaac

SEQ ID NO: 506 - DNA, 534 bp, Artificial Sequence
  Description of Artificial Sequence: Synthetic Transcript Sequence
atgcattcatccgctctcctgtgttgcttggtgctgctgaccggagtgagggcgtccccgggtcagggaacccaatcagaaaacagttgcacccacttcccgggcaatctgccaaatatgctgcgggatctgagagacgcattctcacgtgtcaagactttcttccaaatgaaagatcagttggataacctgctccttaaagaatcactgctcgaggacttcaagggatacttgggatgccaagcgctgtcagagatgatccagttttacctggaggaggtcatgccgcaggcggagaaccaggaccccgatatcaaggcccacgtgaacagcctgggtgagaatttgaaaactctgcggctccgcctgagaagatgccatcgatttctcccatgcgaaaacaagtcgaaggcagtggagcaggtcaaaaatgcctttaacaagctgcaagaaaagggaatctacaaggccatgagcgagttcgatatcttcatcaattacattgaagcgtacatgactatgaagatccgcaac

SEQ ID NO: 507 - DNA, 534 bp, Artificial Sequence
  Description of Artificial Sequence: Synthetic Transcript Sequence
atgcacagttcagcccttctgtgctgtctggtactcctgactggcgtccgggccagcccaggccaagggactcagagcgagaattcctgtacccattttcctggtaacctgcctaatatgttgcgggacctccgagacgcattcagtcgggttaagacattcttccagatgaaagatcagctggacaacctactgctgaaggaatccttactagaggactttaaaggctacctcggctgtcaggccctctcagagatgatccagttttatctcgaggaggtgatgccacaggccgaaaatcaggacccagatattaaggcacacgtgaactccctgggggagaatctgaagacactgcgactacgtctgaggagatgtcaccgctttctgccttgtgaaaataagtctaaagcagtggaacaagtgaaaaacgcttttaacaagctgcaggagaagggcatttataaagctatgagcgagtttgacattttcatcaactatattgaagcttacatgactatgaagattcggaat

SEQ ID NO: 508 - DNA, 534 bp, Artificial Sequence
  Description of Artificial Sequence: Synthetic Transcript Sequence
atgcactcgtcggcactcctgtgttgccttgtgctgctgactggcgtgagagcctctccaggacagggaactcaatcggagaactcgtgtacccacttcccggggaacctcccgaacatgttgcgcgacctccgggacgctttctcccgcgtcaagacgttcttccaaatgaaggatcagctggacaacctcctgctcaaggagagccttcttgaagatttcaagggttacctcggatgccaggccctgtcggagatgatccagttctacctggaggaagtgatgccgcaagccgagaatcaggatccagatatcaaggcccatgtgaactcacttggagagaatctgaaaactctgaggcttcggctgaggagatgccaccgcttcctcccgtgcgagaataagtcaaaggccgtggagcaggtcaaaaatgccttcaataagctccaagaaaagggaatctataaggctatgtccgaattcgacatcttcatcaactacattgaggcttacatgactatgaagatccgaaat

SEQ ID NO: 509 - DNA, 534 bp, Artificial Sequence
  Description of Artificial Sequence: Synthetic Transcript Sequence
atgcacagctccgccctgctgtgttgcctcgtgctgttgaccggagttagggcctcaccaggccaagggacccaatctgaaaatagctgcactcattttcccggcaatctgcccaacatgctaagggacctaagagatgccttctctcgggtgaaaacctttttccagatgaaggaccaactggacaatttgctgcttaaagaatctctcctcgaagactttaaggggtacctggggtgtcaagccctgtctgaaatgatccagttttatcttgaggaggttatgccacaggctgagaaccaagatcctgatatcaaggcccatgtgaacagcctgggagaaaacctgaaaaccctcaggcttcgattacgacgctgccaccgcttcctgccatgtgaaaacaagagtaaggctgtggagcaagttaagaatgccttcaacaaattacaggagaagggcatctacaaggcgatgtccgagtttgatatttttatcaattacatcgaggcctatatgacaatgaagattcggaac

SEQ ID NO: 510 - DNA, 534 bp, Artificial Sequence
  Description of Artificial Sequence: Synthetic Transcript Sequence
atgcacagctccgctctgctgtgctgcctcgttctcctgactggagtgagggcgagtcccggccaggggacgcagtcagaaaactcctgcactcacttcccaggtaatctgccaaacatgctgagagatcttagagacgctttctccagggtcaaaacctttttccagatgaaggatcaactcgataatctgcttctgaaagaatctctccttgaggacttcaaaggataccttggctgccaggcactgtctgagatgatacaattttatctggaggaagtgatgcctcaggctgagaatcaggatcccgacatcaaggcgcacgtgaactccttgggcgaaaatctgaaaacactgagactcaggcttcgaagatgccacagattcttgccctgtgagaataaaagtaaagctgtggagcaagtgaagaacgcctttaataagcttcaagaaaaggggatttacaaggctatgagcgaattcgatatcttcattaattacatcgaggcctatatgactatgaagatccggaat

SEQ ID NO: 511 - DNA, 534 bp, Artificial Sequence
  Description of Artificial Sequence: Synthetic Transcript Sequence
atgcactcgtcggcgctgctgtgctgcctggtgctccttactggagtgcgcgcatcccccggccaaggaactcagagtgagaactcctgcactcacttcccgggcaacctcccgaacatgctgcgggatctgcgggacgccttctcacgcgtaaagaccttcttccaaatgaaggaccagctggacaatctgctcctcaaggaatcactcctggaagatttcaaggggtacctgggctgccaggcgctttcggagatgatccagttctacctcgaggaggtcatgccgcaggcggaaaaccaggatcctgacataaaagctcacgtcaatagcctcggagaaaacctcaagacgctccgactgcggctgcgaagatgtcaccgcttcctgccgtgtgagaacaaatcgaaggcagtggaacaagtcaagaatgccttcaacaagctccaagagaaaggcatttacaaagccatgagcgaatttgatatctttatcaactatatcgaggcttacatgaccatgaagatccgcaat

SEQ ID NO: 512 - DNA, 1170 bp, Artificial Sequence
  Description of Artificial Sequence: Synthetic Transcript Sequence
atgcccccttccggactgcggctactccctctgcttctcccactgttgtggctacttgtgctcaccccaggtcgcccagctgcggggctgtcaacgtgcaagacaattgatatggagcttgtcaaaagaaaacgcatcgaggcaatcagggggcagatccttagtaaacttaggcttgcctctcccccgtctcagggagaggtccctccaggacccctccccgaagccgttctggctctgtacaattcaaccagggacagggtcgcaggagagtccgctgaacctgaaccagaacccgaagccgactattatgctaaagaagtgacccgggtgttgatggtggagacacacaatgagatctatgacaagtttaagcagtctacccactcaatttatatgttctttaacaccagcgaactacgcgaggcagtacccgagcccgtgctcctgtcgagggccgaactgaggctcctcagacttaagttgaaggtagaacagcatgtggaactgtaccaaaagtatagcaacaatagctggagatatctgagtaacagactgctcgctccttcagactcaccagagtggttgtccttcgacgttaccggagtagtccggcagtggctgtcccgggggggagagattgagggttttaggctgtcagcacattgttcttgcgactccagagacaataccctgcaggtggatattaatggctttacaactggccggagaggtgacctcgctactatccatggcatgaatcgcccctttctgctccttatggccacccccttggagagagcccagcacctacagtctagccgtcacaggcgcgccctcgacaccaactattgtttctccagcactgaaaaaaattgctgtgttaggcagctctacatcgattttcgcaaagatttgggctggaaatggatccatgagccaaagggatatcatgccaatttctgcctgggcccatgtccttacatctggtccttggatactcagtactctaaggttcttgcactttataaccagcacaatccaggcgcctctgccgcaccgtgttgtgtcccccaggccttagagcccctccccattgtatattacgtgggtcgaaaaccaaaggtagagcagctctcaaacatgattgtgaggtcctgtaaatgtagc

SEQ ID NO: 513 - DNA, 1170 bp, Artificial Sequence
  Description of Artificial Sequence: Synthetic Transcript Sequence
atgccaccttccggcctgcggctgcttcctctgctgctcccattattgtggcttctcgtgctgactccggggcggcctgccgcaggcctgtccacatgcaaaaccatagacatggaactagtgaagcgaaagcgtattgaagctatacggggccagatcctttccaaactccgtcttgcgtccccgccctctcaaggtgaggttcctcctggcccactgcccgaggccgttttagctctatataactccaccagggaccgcgtagcgggggaatcagccgaaccagaaccggagcccgaggctgattactatgccaaagaagtgaccagagtgctgatggtggagacgcacaatgaaatctacgacaaattcaaacagtcgacccactctatatacatgttctttaatactagcgagctgcgagaagccgtgcctgagcccgtgctgctttcaagggcggagctgcgtctcctgaggctgaagctgaaagtggagcaacacgttgaactttaccagaaatacagcaacaactcctggaggtacttgtctaatcgtctcctggcaccaagcgattccccagaatggttgtcattcgacgtgaccggggtagtgcgacagtggctgtcaaggggcggcgagattgaggggtttcgtctctccgcacattgttcttgtgacagtagggataatacgctgcaggtcgacataaacggcttcacaacaggcaggcgaggtgatctggctacaattcacggcatgaataggccattcctgctccttatggctacaccactagaacgtgcccagcacctccaaagctcacgccatcggagagcactcgataccaactactgcttttcgtctacggaaaaaaactgttgcgttcgccagctctacattgattttcggaaagacttgggttggaagtggattcatgaacctaaagggtaccatgcaaacttctgcctgggcccttgcccctacatttggagcctggatacacaatacagtaaggtgctggccctctacaatcaacataatcccggagctagcgcagcaccttgttgtgtcccgcaggctttagagccattgcccatcgtgtactatgtgggcagaaagcccaaggttgaacagctctccaatatgatagtccggtcttgcaagtgttca

SEQ ID NO: 514 - DNA, 1170 bp, Artificial Sequence
  Description of Artificial Sequence: Synthetic Transcript Sequence
atgccaccgtccggactccgcttgctcccgctgctcctgccactgctgtggctgctcgtgttgaccccgggcaggccagcggcgggactgtcaacctgcaaaactatcgatatggaattggtgaagagaaaacgcatcgaggccatcaggggacaaattctgtccaagctgcggttggcctccccgccaagccaaggagaagtgcccccaggtccactgcccgaggccgtgctcgccctgtacaacagcactcgcgaccgcgtggcaggagagtccgcagaaccggagccagaaccggaagcagattactacgcgaaagaagtgactagagtcctgatggtggaaactcacaacgagatctacgataagttcaagcagtcaacgcacagcatctacatgttcttcaatacctccgaactccgagaagccgtcccggaacccgtcctgctctccagagccgaacttcgcctcctgcgcctgaagctgaaggtggagcagcacgtggagctctatcagaagtactcaaacaattcgtggaggtacctgtccaacaggctgctggccccgtcggactcccctgaatggctcagtttcgacgtgaccggagtcgtgaggcagtggttgagccgcggaggagaaatcgaaggattcagactgtcggcacactgttcctgtgactctcgcgacaacaccctgcaagtggatatcaacggatttaccaccggccgccgcggggatctggcaactatccatgggatgaaccgcccattcctgctgctgatggcaacccctcttgaacgcgcccagcatctccagtcgtcccggcaccggcgcgcgctggacaccaactactgtttcagctcgactgaaaagaattgttgcgtcagacagctgtacatcgatttcagaaaggatctcggctggaaatggatccacgagccgaagggataccacgctaacttttgtcttggcccgtgtccgtacatctggtccctggacactcagtattccaaggtgctggccctctataaccaacataatccaggagccagcgctgcgccatgctgcgtcccacaggcactggaaccgctgccgattgtgtactacgtgggaaggaaaccaaaggtcgagcagctctctaacatgatcgtgcggtcatgcaaatgctcg

SEQ ID NO: 515 - DNA, 1170 bp, Artificial Sequence
  Description of Artificial Sequence: Synthetic Transcript Sequence
atgccgccctcaggcctcaggctgttgccactgctgctgcccttgctctggcttcttgtgctcacccctggaagaccagccgccggactgtcgacatgcaagacaattgatatggagctggtgaaacggaagagaatcgaagctataaggggacaaatcctttcaaaactcaggttggcctctccaccctcccagggggaggttccaccgggacctctgcctgaggctgtgctggccctatacaacagcacaagggacagagttgctggcgaatctgctgaacccgagcccgaaccagaagctgattattatgctaaagaagttacccgagtgctgatggtggaaacacataacgaaatttatgacaaattcaagcagagtacccacagcatttacatgttctttaacactagcgagcttagggaagccgtacctgagcctgtgctcttgtcgagagctgaactccgtctgctgcgacttaaacttaaagtggagcagcacgtcgagctgtatcaaaagtactctaataacagttggagatacctctctaacagactgctagcacccagcgactcacctgaatggctcagttttgacgtgacaggcgtggtccgccagtggctcagtaggggaggagaaatcgaaggatttaggctgagcgcccactgctcgtgcgacagtagagataacaccttgcaggtcgacataaacggtttcactaccggaagaaggggggacctcgccacaatccatggaatgaaccggcccttccttctcctgatggccacaccgctcgagagagcccaacatctgcagtcaagccggcataggagggcgctggacactaactactgttttagcagtacagaaaaaaattgttgtgtccgtcaactctatatagattttcgcaaggatctcggatggaaatggatccacgagcccaagggatatcacgctaacttctgcctggggccgtgcccctatatttggagcttggatactcaatatagcaaagtactggctctgtacaatcaacacaatcccggagcttccgctgctccgtgctgcgtaccccaggccctcgagccactacccattgtatactatgttggtagaaaacctaaagtggaacaactgagcaatatgatcgtacgcagttgcaagtgctca

SEQ ID NO: 516 - DNA, 1170 bp, Artificial Sequence
  Description of Artificial Sequence: Synthetic Transcript Sequence
atgccgccatccggacttaggctgctgcctctgcttcttccgctgctgtggctgttggtactgactccgggccggcctgcggcgggtctgtcgacgtgcaaaaccatcgacatggagctggtcaaacggaaacgcatagaagcaattcggggtcagatcctgagcaagctcagactggcttcgcccccctcccagggtgaagtgcctccgggaccgcttcctgaagctgtgctcgctttgtacaatagcacccgggacagggtcgctggagagtcggccgagcccgagccagagccagaggccgactactacgcgaaagaagtcacccgagtgcttatggtggaaactcacaatgagatctacgataagtttaagcaaagcactcattcgatatacatgttcttcaatacttccgagctcagggaagctgtcccagaaccagtgttgttgtcacgggctgaactgcggctgctgcgcctgaagctcaaagtggaacagcatgtcgaactgtaccagaagtattcaaacaacagctggcgctacctgtctaaccgactgctggcccccagcgactccccggagtggctgagctttgacgtgactggagtggtccgtcaatggcttagccgcggcggagaaatcgaagggtttagattgtccgcccactgttcatgcgactcaagagataacaccctgcaggtcgacattaatggcttcaccaccgggcggcgcggagatctggcaactattcacggcatgaaccgcccgtttctgcttctgatggccacgcctctggagcgggcgcaacatctgcaatcaagtagacaccgccgggccctggacaccaactattgcttctcgtccaccgagaagaactgttgtgtcagacagctgtacatcgattttcgcaaggatctcggttggaagtggatccacgaaccaaagggctaccatgctaatttctgcctcggaccgtgcccgtacatctggtccctggacacgcagtacagcaaggtgctcgccctgtacaaccaacataatcctggtgcaagcgccgccccgtgctgcgtgccgcaggctctggagccgctgccgatcgtttactacgttggacgcaaaccgaaggtggaacagctctcaaatatgatcgtccggtcctgcaagtgctcg

SEQ ID NO: 517 - DNA, 1170 bp, Artificial Sequence
  Description of Artificial Sequence: Synthetic Transcript Sequence
atgccaccgtccggcctccgccttctgcctttgctcctgcccttgctgtggctgcttgtgttgacgcccggcagacctgcggcgggcctttcaacctgtaagactattgacatggaactggtgaagcgcaaaagaatcgaagcaatcagaggacagattctttccaagctgcgacttgcctcacctccatcacagggggaggtcccaccaggacctctgccagaagcagtgctggccctgtacaattcaacgcgtgaccgtgtggcgggggagagcgccgagcctgaacctgaacccgaggcggactactacgcaaaagaggtgactagagtgctcatggtcgaaactcataacgagatttacgacaagtttaagcagtccacccatagcatctacatgtttttcaatacttcagagctccgggaagctgtgccagaaccagtgttgctttcgcgtgcagagcttcggcttctgcgcctgaagttgaaggtcgagcaacacgtggaactgtaccaaaagtactcaaacaattcgtggcgatacctttcgaaccggttgcttgcaccttcggatagtccagagtggctctcatttgatgtgaccggagtcgtcagacagtggctctcgcggggtggagaaattgaaggttttcggctctcggcacattgttcctgtgactccagggataatactctgcaagtggacattaacggatttacgactggacgcaggggcgatctggcaacgattcacggaatgaatcggccatttcttcttttgatggcaaccccacttgagcgagcacaacatctgcagtcgtcgcgtcatcgccgggctcttgataccaattactgcttttcgtcgaccgaaaagaactgttgtgtcaggcaattgtacattgactttcggaaagatcttggttggaaatggatccatgaacctaaagggtaccacgcaaatttctgtctgggtccttgtccatacatttggtccctggatacccagtattcaaaggtgcttgccctttacaaccagcacaatccgggggcctccgctgcgccatgttgcgtgccccaagcacttgagccccttccgattgtctactacgtgggaagaaagccaaaggttgagcaacttagcaacatgattgtgaggtcctgcaaatgttcg

SEQ ID NO: 518 - DNA, 1170 bp, Artificial Sequence
  Description of Artificial Sequence: Synthetic Transcript Sequence
atgcctccatccgggctcagactcctaccactgttgcttccattgttatggctcctcgttttgactcctggaagacctgccgctggactttctacatgcaaaacaattgatatggaattagtgaaacgtaaacgcatcgaagcaatccgggggcagatactctccaagctgcgcctcgccagtcctccctctcagggggaggtgccaccaggaccactccctgaagccgtgctcgctctatacaactcaactcgggatagggttgctggggaatcagctgaacctgaaccagaacccgaagcggattattatgcaaaagaagttactcgggtgctcatggtagaaacacataatgaaatctatgataaattcaaacagtctacacattctatatatatgttcttcaatacatccgaacttagagaagctgtgcccgagcccgtactcctctcacgagctgaactccggctcttacgcctcaaactgaaggtagaacagcatgtagaactttatcagaaatattcaaacaactcttggaggtatctttcaaataggttgctcgcacctagtgattcaccagagtggctgtcgtttgatgtgacaggagttgtgcgacagtggctctcaagagggggagaaatagagggatttcggctgagtgcacattgttcgtgtgatagtagggataatacactccaggtagatatcaatgggttcacaactgggcggcgcggggatcttgcaacaatacacggaatgaatcggccttttcttttattaatggccactccattagaacgcgcccagcacctgcagagttcccggcacagacgtgccctggatacaaactactgcttttctagtactgaaaaaaactgttgtgttcggcagctttatatagattttaggaaggatcttggatggaagtggatccacgagcctaaaggatatcacgcaaatttttgcctagggccctgcccttatatatggagtcttgacactcagtacagtaaagtgctcgctctctacaatcagcacaacccaggagcttcagcagccccctgctgtgtccctcaggcattagaaccgctacctatagtgtattatgtggggcggaaacctaaggtagagcagctctccaatatgatcgtgcgaagttgcaaatgttcc

SEQ ID NO: 519 - DNA, 1170 bp, Artificial Sequence
  Description of Artificial Sequence: Synthetic Transcript Sequence
atgccgccatccggactgcggctgctcccactgcttctcccccttctgtggcttcttgtgttgactcctggacgcccggccgccgggctctcgacctgcaagacgatcgatatggagctggtgaaacggaagcgtatcgaggcgatcagaggacaaatcctctcgaaactgagattggcttcccctccatcccagggagaagtgccgcctggaccactgcctgaagccgtgcttgctctctacaattcgactagagatcgggtcgctggagaatcagcagaacctgaaccggaaccggaagccgactactacgctaaggaggtaaccagagtgttgatggtggagactcataacgaaatctacgataagttcaagcaaagcacccacagcatttacatgttcttcaacacctccgagctccgcgaggcagtccccgagcctgtgctcttgagcagagctgagctgcgtctgttgaggctgaagctgaaggtggagcaacatgtcgaactctaccaaaagtactcgaataattcatggcggtacctctcaaacagattgctggctccgtctgactcgccggaatggctctcgttcgatgttactggagtggttagacagtggttgtcacggggcggagaaatcgaaggatttcgcctgtcggcccactgtagctgcgatagtcgggacaatacccttcaggtggacatcaacggattcaccaccggccggagaggggacctggccacgatccacggaatgaacaggccattcctgcttctcatggcgacccccttggagcgcgcccaacaccttcagtcctcacgacacaggagagcactcgataccaactactgcttttcaagcactgagaagaactgctgcgtgcgccagttgtatatagacttccgcaaggacctcggctggaagtggatccatgaaccaaaaggataccatgctaatttctgcttgggcccctgtccatatatctggtccctggatactcaatacagcaaagtgctggccctgtacaaccagcacaacccgggagcctcagccgccccatgttgtgtcccacaagcgctcgaaccactgccgatcgtgtattacgtggggcgcaaaccgaaggtggaacagctctcgaatatgatcgtgcgatcctgcaagtgctca

SEQ ID NO: 520 - DNA, 1170 bp, Artificial Sequence
  Description of Artificial Sequence: Synthetic Transcript Sequence
atgccgcccagcggactaaggttactgccattgctcttgcctcttctttggcttttggttctgaccccaggacgacccgccgccggcctcagcacttgtaaaaccattgacatggaactggtcaaacgtaagcggatcgaggccataagggggcagattttgtccaagctcaggctagcatcacccccatcacagggcgaggtgccacctggtccactgccagaagctgtgctggcactctataattcaactagagatagggtggctggcgagtccgccgagccagaacccgagcccgaggctgactattacgccaaagaagtcactcgggtcctgatggtagagacccataatgaaatctatgataagttcaaacagagcacacactccatatacatgtttttcaacacttccgaactgcgcgaagccgtaccagagcccgtccttttatcaagggccgagctgcgtctgttaaggctgaaactcaaggtcgaacaacacgtcgagctgtatcagaagtattctaacaattcctggaggtacctgagtaatagattgctcgctccctccgattcccccgaatggctgtcgttcgacgtgaccggagtggtccggcagtggctttcgagggggggcgaaattgaaggctttcgcttgagcgcacattgctcctgcgatagccgggataatacactgcaggtggatataaatgggttcaccacaggcaggaggggagacttggctaccattcatgggatgaatagaccattcttactgcttatggcgacccccttggagagggcacaacacctgcaaagttcaaggcacaggcgtgcactagatactaattactgtttcagctcaacagagaagaattgctgcgtgcggcagttatatatcgattttaggaaggacctgggatggaaatggattcacgaaccaaagggttaccacgccaacttttgtctcgggccgtgtccctacatttggtcccttgatacccaatattcaaaagtgttggctctctacaaccagcataaccccggcgcctccgcagccccctgctgcgtacctcaggctcttgaacctttgcctatcgtgtattacgtaggccgaaaacccaaagtagagcagctctccaacatgatcgtgaggagttgtaagtgtagc

SEQ ID NO: 521 - DNA, 1170 bp, Artificial Sequence
  Description of Artificial Sequence: Synthetic Transcript Sequence
atgcctccaagtggccttagactccttccgctacttctgccactgctgtggctgctggttctgacacctggcagacctgccgctggcttgagcacatgcaagacaatcgatatggaactagtcaagcgcaaacggattgaggctatccgggggcaaattctttccaaactgagacttgcaagcccaccatctcagggcgaggttcctccagggcctctgcccgaggccgttttagccctgtacaactcaaccagggaccgcgtcgccggagagagcgccgaacctgaacctgagcccgaagccgattactatgctaaagaagtcaccagagtactgatggtcgagacccacaacgagatatacgataagttcaaacagtctacacatagcatctacatgttcttcaacacttctgagctgagagaggctgtgcccgaaccagttctgctcagccgcgcagagttacggctgttacggctgaagctgaaagtcgaacagcacgtcgagctataccagaaatacagtaataattcatggcggtatttgtctaaccgcttacttgcccccagcgactcccccgaatggctatccttcgacgttaccggcgtcgtgaggcagtggctaagtcgcggaggggagattgaggggttccggctgtccgcccactgctcttgtgattcccgcgacaatactctgcaggtggacatcaacggatttacaaccggccgccgaggcgacctggctaccatccacggcatgaacagacctttcctgctgcttatggccacacccctggaacgggcacaacacttgcagtcctccaggcaccgccgggccctcgataccaattactgcttctcttctacagagaaaaattgttgcgtgcgccagctatatattgacttcagaaaggacctgggatggaagtggattcacgaacctaaaggctaccacgcaaatttttgcctgggtccttgcccctacatttggtctctggatacacagtacagcaaagttcttgccctgtacaaccagcataatcccggcgcaagcgccgccccttgttgcgttcctcaggctctcgaaccacttcccatcgtgtattatgtcggccgcaaacctaaagttgagcaactcagcaacatgattgtcaggagttgcaagtgttct

SEQ ID NO: 522 - DNA, 1170 bp, Artificial Sequence
  Description of Artificial Sequence: Synthetic Transcript Sequence
atgccgccgagcggtctgcgccttctgcctttgctgttaccactgttatggctcctggtgctgacgccgggtcgccccgctgctggtctaagcacctgcaagacaatagacatggaactggtgaagcgcaaacgcattgaggcgattcgcggccaaatactgtctaagctgagattggcttctcctccgagccaaggtgaagtccctccgggcccactgcctgaagcagtattggcgctgtacaacagcacacgtgatcgtgtcgctggtgaatccgcagagccggaaccggaacctgaggcagattattatgcaaaagaagttacgcgcgtgctgatggtggagacgcacaatgagatatatgataaattcaaacagtccactcatagcatctacatgttctttaatacgagcgagttgcgcgaggcagtgccggagccggtccttctttcccgcgcagagctgcgtctgttacgcctgaaactcaaggtggaacaacacgtggaactgtatcaaaaatatagcaacaatagttggcgctatctgagcaacagactgttagcgccttctgattctccggaatggctgagcttcgacgttactggtgttgttcgccagtggctgagccgcggtggggagatagaagggtttcgcctgtctgcacattgtagttgtgacagcagagacaataccctgcaggtagacatcaacggtttcactaccgggcgcagaggtgatctggccaccattcatggcatgaatcgcccttttctgttgctgatggcaactccgctggagcgcgcccagcacttgcaaagcagccgccaccgtcgcgcgcttgatacgaattattgctttagctctacggagaaaaattgttgtgtgaggcagttatacattgacttccgtaaagatctgggctggaagtggatccatgaaccaaagggctaccatgctaatttctgtctggggccatgtccgtacatttggagcctcgacacacagtactctaaagttcttgcgctgtataaccaacacaatcctggtgcgtctgcagcgccatgttgtgtcccgcaagcgctggagccactgccaatagtgtactacgttggtaggaagcctaaagttgagcagctgtcgaacatgattgtgcgcagctgtaaatgcagc

SEQ ID NO: 523 - DNA, 1170 bp, Artificial Sequence
  Description of Artificial Sequence: Synthetic Transcript Sequence
atgcccccctccggtttaagattgctgccactcttactgccactgctgtggttgttggtcttgacaccaggaaggccagcagcaggcttgagtacttgcaagaccatcgacatggagctcgtgaagagaaagcgcattgaagccatccggggacaaatcctgtcgaaacttcgcttggcttcgcccccaagtcaaggtgaggtgcccccagggccactgcctgaggccgtgctggctttgtacaactctacgagagacagggtggctggcgaatcagctgaaccagaaccagagccggaggccgattactacgccaaagaggtaacgcgggtcttgatggttgagacacacaacgagatatacgacaagtttaagcaatccactcatagtatatatatgttctttaatacatccgagctgcgagaagccgtcccagagcccgtgctcttgtcacgggccgaactgaggctcctgagattgaaactaaaagtcgagcagcatgttgagctctaccaaaagtactctaacaactcatggcgatatctctcgaacaggctcctggcccctagtgattcccccgaatggctgtcatttgacgtgaccggagtagttagacagtggctgagcagaggcggggagatcgaggggtttaggttatccgctcactgcagctgcgattctagagataacacattgcaagttgacatcaacggcttcactaccgggcgccggggtgatctcgcgaccatccatggaatgaacagaccatttctactactgatggctacaccattggaacgtgctcagcacctacagagttcacgtcataggagggcacttgacacgaattactgctttagctcaaccgaaaagaattgctgcgtgcgccagctatatatcgacttccggaaggatctgggatggaagtggatccacgagcccaaagggtaccacgctaacttttgccttggcccatgcccctatatttggtctttggatacccagtatagtaaggtcctggccctctataaccaacataacccaggggcatcggctgcgccatgttgcgtcccacaggccctcgagccgctgccaatagtttactacgtgggcaggaagcctaaggtggagcagctgtctaacatgattgtgcgttcctgtaaatgctca

SEQ ID NO: 524 - DNA, 1170 bp, Artificial Sequence
  Description of Artificial Sequence: Synthetic Transcript Sequence
atgcccccgtccggactgcgcttgctcccgctgcttctgccactgttgtggttgctggtgctgacgccagggcggccagccgcaggcctttccacctgtaagactatcgatatggagctggtgaaacgcaaacggatcgaagcaatccggggacaaatcctgagcaaactgaggctcgctagccctccatcccagggtgaagtcccaccggggccgcttcccgaagcagtgcttgcactctacaattctactcgggacagagtggctggagaatcggcggaacccgagccagagccagaagcagactactacgcaaaagaggtcaccagggtgctgatggtggaaactcataacgagatctacgataagttcaagcagtccactcactccatttacatgttcttcaatacttccgaattgcgcgaagcggtcccagaacctgtgttgctgtcccgcgcagagctgagacttttgaggcttaagctgaaagtggaacaacatgtggagctttaccaaaagtactcaaacaattcctggcggtatctctccaatcgcctcttggcccccagcgattcgcctgaatggctttcgttcgatgtgaccggagtcgtccggcaatggctgtcacgtggaggggaaatagaggggtttaggcttagcgcacattgttcgtgtgattcacgggacaataccctgcaggtggatatcaacggattcaccacgggaaggagaggggatctcgcgaccatccatggcatgaatcgtccttttctgctccttatggcaactcctcttgaacgcgcgcagcaccttcagtcatcacgacatagaagagcccttgacacgaactactgcttttcgtcgaccgagaaaaactgctgtgtccgccaactgtacatcgactttcggaaggatcttgggtggaaatggattcatgaacctaagggttaccatgcaaatttctgtctgggaccgtgtccatacatctggtcgctcgatacccaatactccaaagttcttgccctgtacaaccaacacaacccaggagcctcagcagccccttgctgcgtgccacaagcacttgaacccctcccaattgtgtattacgtgggacgcaagcctaaggttgagcaactctcgaatatgattgtccggtcgtgtaagtgttcc

SEQ ID NO: 525 - DNA, 1170 bp, Artificial Sequence
  Description of Artificial Sequence: Synthetic Transcript Sequence
atgcctccatcggggctcagactgcttccactgcttctccctctgctttggctcctcgtgctgaccccagggcgtcccgcagcaggactgtcgacgtgtaagaccattgatatggaactcgttaaaaggaaaaggattgaggcaatccgcggtcaaattctctcgaagctgcggctggcgtcgcctccctcgcaaggagaagtgcctcctggacctctccctgaagccgttctcgcactttacaactccactcgggaccgcgtggccggggaatctgccgagcccgaacccgaacctgaagcagattactatgcaaaggaagtcactagagttcttatggtcgagacgcacaacgagatttacgacaagtttaagcagtccactcattccatatacatgtttttcaatacctccgagcttcgggaagccgtgccagagcccgtgcttctgagccgcgcagagttgcgccttctcagactgaagctgaaagtggagcagcacgtggaactgtaccaaaagtattccaataactcatggaggtatctctcaaatcgactcctggctcccagcgattcacccgaatggctttcctttgacgtaaccggcgtcgtcaggcagtggctgtcacgtgggggtgagatagaaggattccgcctgtccgctcactgttcctgtgacagccgtgataacactcttcaggtcgatatcaatggattcaccaccgggcggcggggtgatcttgcaaccattcacggaatgaatagacctttcctgcttctgatggcgacccctcttgaacgggcccaacatctgcagagctccaggcatagacgcgcccttgataccaactactgcttttcatccactgaaaagaattgttgtgtgcgccaactgtacatcgatttccgaaaggatctcggttggaagtggattcatgaaccaaaggggtaccatgcaaacttctgtcttggtccatgtccatacatatggtctttggacacccaatactcaaaggtgcttgccctctataaccaacataaccccggagcatcagcggccccatgttgtgtgccacaggccctggaaccccttcctatcgtgtactacgtgggtcgaaaaccaaaggtcgagcagctgtcgaatatgattgtgcgttcatgtaagtgttcc

SEQ ID NO: 526 - DNA, 1170 bp, Artificial Sequence
  Description of Artificial Sequence: Synthetic Transcript Sequence
atgccgccgtcagggctgcgcctgctgcccctgctgctgccgttgctctggctgctcgttctgacgccgggacgacctgccgccggactctcaacttgcaagactatcgacatggaattggtcaagagaaagagaatcgaagccattagaggacagatcctctctaagctgcggctcgcctctcccccgagccaaggagaagttccaccggggccgctgcccgaagccgtcctggctctgtacaacagtacccgcgatcgcgtggctggggaatccgcagagccagaacccgagccggaagctgactactacgcgaaggaagtgactcgggttctgatggtggaaactcacaacgagatctacgataagttcaaacagagcacccactccatctacatgttcttcaatacttcggagctgagggaggctgtgccagagcctgtgctgctgtccagggcggagttgcggctccttagactgaagctgaaagtcgaacaacacgtggagttgtaccagaagtacagcaataactcctggcggtacctgagcaatagactgctcgcgccgtccgactccccagaatggctcagctttgatgtgactggagtggtgagacagtggctgagccgcgggggcgagatcgagggattcaggctttctgcgcactgttcatgcgactcgcgcgacaatactctgcaagtcgacataaacggatttaccactggcagacggggagatctcgccaccatccacggaatgaatcgcccgttcctcctcctgatggcgaccccgctggagcgcgcacagcacttgcagagctcacgccacagaagggcgctggacaccaattactgcttctcgtcaaccgagaaaaactgctgcgtcaggcaactgtacatcgatttcagaaaagatctcggatggaagtggatccacgaacccaaaggctaccacgctaacttctgcctcggaccatgcccgtacatctggtccctcgacactcaatactcgaaggtcttggccctctacaaccagcataatccgggagcgtcagcggcaccatgttgcgtcccacaggctctcgaaccgctgcccatcgtgtactatgtggggcgcaagcctaaagtggaacaactctcaaacatgatcgtgcggtcctgcaaatgtagc

SEQ ID NO: 527 - DNA, 1170 bp, Artificial Sequence
  Description of Artificial Sequence: Synthetic Transcript Sequence
atgccgccatcaggactgagactgctgcctctcctgctgcctctgctgtggttgctcgtgctcactccaggacgcccagccgcgggactgtcaacttgcaagactatcgacatggagcttgtgaagagaaagcgcatcgaagctatccgcggacaaatcctcagcaagctgcggctggctagccccccatcgcagggtgaagtgccaccgggaccactgcccgaagccgtgctggcgctgtacaactccacgcgggatcgcgtggccggagagtccgccgaaccagaacccgagcccgaagcagactactacgctaaggaagtgacgcgggtcctcatggtcgagactcacaacgagatctacgacaaattcaaacaatccacccactcgatctacatgttctttaacacgagcgaactgagggaagccgtgcctgagccagtgctgctgagccgcgcggagctcagactccttcgcctcaaattgaaggtcgagcagcatgtggaactgtaccagaagtactcaaataactcgtggcggtacctgagcaaccggctgttggccccttctgattccccggagtggctgtcctttgacgtgactggagtggtccggcagtggctgtcccggggaggcgagattgaaggcttccggcttagcgcgcactgctcgtgcgactcaagggataacactctgcaggtcgatatcaacgggttcactaccggccgccggggcgatctggcaacgattcacggcatgaatagaccgttcctccttcttatggccactcctctggagagagcccagcatctgcagtcaagccggcatcgcagggctctggacactaattactgctttagttccactgaaaagaattgctgcgtgcgccaactgtacatagatttcaggaaggacctcggttggaaatggatccatgagccaaagggataccacgcaaacttctgcctggggccttgcccgtacatctggtcgctcgacacccagtactcaaaagtcctggcgctctacaaccagcacaatcctggagcctcggcagcgccgtgttgcgtcccacaggccctggagcctctcccgatcgtgtactacgtaggacgcaaaccgaaggtggagcaactgagcaatatgattgtgcgctcctgcaagtgctcg

SEQ ID NO: 528 - DNA, 1170 bp, Artificial Sequence
  Description of Artificial Sequence: Synthetic Transcript Sequence
atgccgccgtcgggacttcgcctccttcctctcctgctgccactgctgtggcttctggtcctcactccaggaaggccggccgctggcctgtcgacttgcaagactatcgatatggaactggtcaagcgcaagcggatcgaagcaatccgaggacagatcttgagcaagctgcgcctggcctcgcccccgtcgcagggtgaagtgcctcctggtccgctgccggaggcggtcctggcactctacaactccacgcgcgaccgggtcgctggagagtcagccgaaccggaacccgaaccagaggccgattactacgcgaaggaagtaacccgcgtcctcatggtggagactcacaacgagatctacgataagttcaaacagagcactcattcaatctacatgttcttcaacacctccgaattgcgggaggctgtgccagaacccgtgctgctgtcaagggcagaacttaggctgctccgccttaaactcaaggtggaacaacacgtggagctgtaccagaagtacagcaataactcgtggcggtacctgtccaacagactcctcgcaccgtccgattcgcctgaatggctgtcctttgacgtgaccggagtggtgcggcaatggctctctcggggaggggagatcgagggattccggctgtcggctcactgcagctgtgacagccgcgacaataccctccaagtggacatcaacggcttcaccactgggcgcagaggggacctggccaccattcatggaatgaacagaccgttcctgctcctgatggccacccctttggaaagagcgcagcacctgcagagctcacggcaccgccgcgccctggataccaattactgcttttcctcgactgagaaaaactgttgcgtgagacagctgtatatcgacttcagaaaagatttgggctggaagtggattcacgaacccaagggttaccatgcgaacttttgtctcggaccgtgcccgtacatctggtcactcgacacgcagtactcgaaagtcctcgcactgtataatcaacataatccaggcgcgtccgcggccccatgctgcgtccctcaagccctggagccgttgccgatcgtgtactacgtgggccgtaagccaaaggttgagcagctttcaaatatgattgtgaggagctgcaaatgctcc

SEQ ID NO: 529 - DNA, 1170 bp, Artificial Sequence
  Description of Artificial Sequence: Synthetic Transcript Sequence
atgcctcccagtggactccggctgcttcctctcctgctgcctttgctctggttgctggtgcttacgcccgggagacccgctgccggactttctacctgcaagactatcgatatggagctggtgaaaagaaagcgcatcgaggccatccgaggacagatcctgagcaagctcaggttggcctcacctccaagccagggtgaagtgcccccaggcccactccccgaagcagtgctggctttgtataacagcacacgggatcgcgttgcaggcgagtctgcagagccagaacccgaaccggaggcagattactacgcaaaagaggtgacaagagtcctgatggtcgagactcataacgagatctacgataaattcaaacaaagcacccacagtatctatatgtttttcaacacaagcgagctccgcgaagccgtgcccgaacctgtcctgctcagcagagctgagctgcgacttctgcgactcaagctgaaggtcgagcagcacgttgaactctaccagaaatacagtaataacagctggcgctacctcagcaacaggctgttggctcctagcgactcccccgagtggcttagctttgatgtcaccggagtggtccggcagtggctttctcgaggtggagagattgagggcttccgcctgagcgcacactgcagctgcgatagccgcgacaacacacttcaggtggatatcaacggttttaccaccggaaggcggggggatctggcaacaattcatggcatgaatcgccccttcctcttgctcatggcaacccccctggagcgggcccagcatctgcaaagctcccggcaccggcgggccctggatactaattattgcttctcttcaactgagaaaaattgctgtgtgcgccaactctacattgatttccggaaggaccttgggtggaagtggattcacgagcctaaagggtaccacgccaatttttgcctgggcccctgcccttacatttggagtctggatacacagtattccaaagtgttggctctgtataatcagcacaatcccggtgcctcagctgcgccctgttgtgttccacaggccctcgaaccactgcctatcgtatactacgtggggcggaaacccaaggtggaacagctgtctaacatgatagtcaggagctgtaagtgctcc

SEQ ID NO: 530 - DNA, 1170 bp, Artificial Sequence
  Description of Artificial Sequence: Synthetic Transcript Sequence
atgccgccgtcgggcctgcggctcttgccactgctcctcccgctgctctggctcctcgtgctcaccccggggcgtccagctgcaggactctcaacctgtaagactatcgatatggagctggttaagcgcaaacgcatcgaagccattcgcggccaaatcctctccaagctgcggctggcgagcccgccatcgcaaggagaagtgcctccgggaccgctgccagaagcagtcctggccctgtacaactcaactcgcgaccgcgtggcgggcgagtccgccgagccagagcccgaaccggaagctgactactacgcgaaggaggtgaccagagtcctgatggtggaaacccacaacgagatctatgacaagttcaagcaatcgacgcactcgatctacatgtttttcaacacctccgaattgcgagaagccgtcccagagcccgttctcctgagccgggcagagctgcggcttctgagactgaaactgaaggtcgagcagcatgtggaactctatcagaaatactccaataactcctggagatacctgtcgaaccggctcctcgcacctagcgattcccctgaatggctgtctttcgacgtcacgggcgtggtccgccagtggttgtcccgcggaggagaaatcgaaggattccgcctgtcagcccattgtagctgtgactcgcgcgacaacaccctccaggtagacattaatggattcactactggacgccgcggcgacctggccactatccatggcatgaacagaccgttcctgctgttgatggcaactccactggaaagagcccagcacctgcagtcgagccggcaccggcgcgccctggatactaattactgcttctcgtcgaccgagaaaaactgttgcgtccgccaactgtacatcgatttccggaaggatctgggttggaaatggatccacgagccaaaaggctatcatgccaacttttgtctgggaccatgtccttacatctggtccttggacacccaatactcgaaggtgctggcgctctacaaccagcataatccaggcgccagcgccgccccctgctgcgtcccccaggccctcgaaccacttcctatcgtctattacgtcgggcggaagcctaaggtggagcaactgagtaatatgatcgtcagaagctgcaagtgttcg

SEQ ID NO: 531 - DNA, 1170 bp, Artificial Sequence
  Description of Artificial Sequence: Synthetic Transcript Sequence
atgccaccatccggtctcaggctcctcccccttctgcttccactgctgtggctactggtccttacaccaggtcgacccgcggcaggcctgtcgacatgcaagactatcgatatggagttggttaagaggaagagaattgaggctattagaggacagattctttctaagttgaggctcgcctcacctccctcccagggggaagtgccgcccgggcctcttcccgaggccgtgctcgccttgtacaacagtaccagagatcgggtggctggcgaatccgccgagcccgagcctgagccggaggccgactattacgctaaagaagtcacccgagttctcatggtcgaaactcataatgaaatatatgacaagttcaagcaatcaactcattcaatctacatgttcttcaatacgtctgagctgcgggaggccgtgcctgaaccagtgctgttgtcccgtgccgaactgcgcctgctcaggcttaaacttaaggtcgagcagcatgtggaactgtaccagaagtattcgaacaattcctggcggtatctgtcaaatcgtttgctggccccgtcagactctcccgagtggctgtcatttgatgtgactggtgtggtgcgacaatggttgtctaggggcggggagattgaaggcttcagactcagcgcccactgttcctgtgacagtagggacaacaccctccaagttgacataaatggattcactacaggacgccgtggggacttagcaactatccacggcatgaaccgaccttttctgttgctgatggctactcccctggaacgagctcagcatttacaatcctctagacaccgccgcgccctggacactaattactgtttcagcagtactgaaaagaattgttgcgtgcggcaactctacatcgactttcgcaaggacctagggtggaagtggatccacgagccgaaagggtaccacgctaatttctgcctcggcccatgtccttacatttggtccctggatacgcagtattcaaaggtactcgccctgtataatcagcataaccctggggcctcagccgccccttgctgtgtgccccaggccctggagccacttccgatcgtttattacgttggccggaagccaaaggtggaacagctctcaaacatgatcgtgcgatcttgtaaatgttcc

SEQ ID NO: 532 - DNA, 1170 bp, Artificial Sequence
  Description of Artificial Sequence: Synthetic Transcript Sequence
atgccacccagtggcctgcgtttgctgccgctccttctccctctgctctggctcctggttctgaccccaggcagacccgccgctggcctgtctacttgcaagacaattgacatggaactcgttaagaggaaacgtattgaggccattcgtggacagattctatcaaaactccgtctggcctcccccccgagtcagggggaggtaccaccgggaccactgccagaagctgttctcgccctctataatagtaccagggatcgtgtagccggagagtccgcagagcctgagcccgaacccgaggccgattactacgcgaaagaagtgacacgggtgctaatggtcgaaactcacaacgagatatacgataagtttaagcaatctacacacagcatttatatgttcttcaatacctcagagctgagagaggccgtacctgaaccagtgcttctgagcagggcggagctgaggttgctgcgcctgaaactcaaagtcgagcagcatgttgagctctaccagaagtactccaataactcttggcggtatttgtctaatagacttttggcacctagcgactctccggagtggctatcatttgacgtgacaggcgtggtgagacagtggctaagccgcggcggggaaatcgagggatttaggctatcagcccactgcagttgcgactcacgcgacaatactctgcaggtggacataaacgggtttaccaccggaaggcgcggcgatttagcaactattcacggcatgaaccggcctttcctcctgctgatggctacccctctcgaacgcgctcagcatcttcaatcgagcaggcaccgccgagcactcgatacaaattattgtttctcctctacagaaaaaaattgttgtgtccggcagctatacatagatttccggaaggatctggggtggaagtggattcacgagccaaaaggctaccatgccaatttttgtctagggccttgcccttatatatggtccctcgacacccagtattccaaagtgttggccctctataatcagcataacccaggtgccagcgccgcgccctgttgtgtcccgcaggctctcgaacctcttcccattgtgtactacgtgggcaggaagccgaaagtagagcagctttcaaacatgatagtgcgatcctgtaaatgctcc

SEQ ID NO: 533 - DNA, 1170 bp, Artificial Sequence
  Description of Artificial Sequence: Synthetic Transcript Sequence
atgccgccatctggcctgagactccttcctctgctcttgccgttgctgtggctgttggtgctgacccctgggcgacccgccgctggcctctccacatgcaagaccattgacatggagctcgttaagagaaagaggatcgaggccattcgtggccaaatactctcaaaattgagactggcgtcaccccctagtcagggtgaagtgccccctggccccctacctgaggccgtgctggctctgtacaatagcaccagagaccgcgtggccggcgagagtgctgagcccgaacccgaaccggaagctgactactacgccaaagaggtaacgcgtgttctgatggtggaaacccataacgaaatctatgacaaatttaaacagtccacccacagcatttacatgtttttcaacacgtcagaacttcgggaggccgtgccagagcctgttctgctgagtcgcgcggagcttcgattgctcagactcaagctcaaagtcgagcagcatgtggagctgtaccagaagtacagcaacaatagttggcggtacctctccaatcgattgctggccccaagcgactctcctgaatggctcagttttgacgtgactggtgtggtgcgccagtggctgagtcgcggcggcgagattgagggattccgattaagcgctcattgttcgtgcgatagccgagacaatactctgcaagtggacatcaacggttttactactgggcgcagaggagatttggctaccattcacggtatgaatcgcccgttcctactgctcatggccaccccgttggagcgtgcgcagcatctgcagagttcacgccatcgaagagccctggacacaaactactgcttctccagtaccgagaaaaactgctgcgttcgtcaactgtatatagattttagaaaggatctgggctggaagtggatccatgaacctaagggatatcacgccaacttctgtctgggcccatgcccttacatctggagtctggacacccagtacagcaaagtgctcgcgctttacaatcagcacaatcccggcgcctctgctgccccatgctgtgtgccccaggcgctggagcctctccccattgtctattatgtcgggaggaagccaaaggtggagcagttgagtaatatgatcgtcagaagttgcaagtgctcc

SEQ ID NO: 534 - DNA, 1170 bp, Artificial Sequence
  Description of Artificial Sequence: Synthetic Transcript Sequence
atgcccccttccgggctcagactgctgcctctgcttttgcctcttctgtggcttctggtccttaccccaggcagacctgcagcgggactttcgacttgtaagaccatagatatggagctggtgaaacgcaagagaatcgaagcaatcaggggtcaaattctgagcaaacttcgtcttgcatcgccccctagccagggcgaagttcctcctggacctctccccgaagccgtgctggccctgtacaattcgaccagagatcgcgtcgccggcgagtcggcagaaccagagcctgaacctgaagcggactattacgcaaaagaggtgactagagtcctcatggtggaaacccacaatgagatctacgacaagtttaagcaaagcactcactcaatttacatgttctttaacaccagcgaacttcgggaagcagtgccagaaccagtgctgctgtcccgcgcagaacttcggttgcttcggctcaagctcaaggtggaacagcatgtggaattgtaccagaagtactccaacaatagctggcgatatctgtccaatcggctgctggcaccgtcggactcgccagaatggctgtccttcgatgtgactggtgtcgtccggcaatggttgtccagaggtggcgaaatcgagggttttcgactctcagcacattgctcctgtgattcccgcgacaacactcttcaagtggatatcaacggctttaccaccggacgacgaggtgatctggccactattcatgggatgaacaggccttttctgcttctgatggcaactccgctggagcgtgcacagcatcttcagagctccagacatagacgcgctctggatactaactactgtttttcaagcaccgaaaagaactgttgtgtgagacaattgtacattgattttcgcaaagatctcggctggaagtggattcacgaacccaagggataccatgcaaacttttgccttggtccttgtccctacatctggagcctcgatacccagtactccaaggtcctcgccctgtacaaccagcacaatcctggcgcttccgcagcaccttgctgcgtcccacaagcacttgaaccgcttccaattgtgtactatgtggggagaaagcctaaagtggaacagctgagcaatatgatagtgcgcagctgtaagtgttcg

SEQ ID NO: 535 - DNA, 1170 bp, Artificial Sequence
  Description of Artificial Sequence: Synthetic Transcript Sequence
atgcctccatccggactgcgcttgctgccactcctgctgcctctcctttggctgcttgtgcttacccctggtcggccagcggccggcctttcgacttgcaagaccatagatatggaactcgtgaagcgtaagcgtattgaagcgatcagaggtcaaattctttccaaactgcgcctcgcaagccccccatcccagggcgaggtgccccctgggccacttccagaagcggtcctggccctgtataactcgacccgggatagggtcgcaggagaaagcgccgagcctgaaccggaacctgaagccgattactacgcaaaagaagtcacccgtgttctcatggtggaaacccataacgagatatatgacaaattcaagcagtcaactcattccatttacatgttctttaacacctcggaactcagagaggcagtgcccgagcctgtgcttctgtcgcgcgctgagctgcgcctcctgcggctgaaactcaaggtggaacagcatgttgaactctaccaaaagtactcgaacaatagctggagatacctttcgaaccgacttctggcaccctcggatagccccgagtggctttcctttgatgtgactggcgtggtgagacaatggctgtcccgaggcggtgaaatagaaggatttcggctgagcgcccactgcagctgcgactcaagagataatacccttcaagttgacattaacggctttactactggtcgaagaggagatctggcaactattcatgggatgaatagaccttttctgcttcttatggcaactcccctggagcgcgcacagcatctgcaaagctcacggcatagacgggctcttgacaccaattactgttttagctcaactgagaagaactgctgtgtgcgtcagctttacattgatttccgtaaggatcttggttggaagtggattcatgagcctaaaggataccacgcaaatttctgtctcgggccatgtccgtacatctggtcgctggatacgcaatattcaaaagtgctcgctctttacaatcaacataaccccggagcatccgccgcaccatgttgtgtgccccaggctttggaaccactgccaatagtttactacgtgggtcgaaagcccaaggttgaacagctgtctaacatgatcgtcagatcgtgtaagtgttca

SEQ ID NO: 536 - DNA, 1170 bp, Artificial Sequence
  Description of Artificial Sequence: Synthetic Transcript Sequence
atgccaccttcgggcctgcggctccttcctctgctgctccctctgctgtggctgctcgtgctgacgcccggacgtcctgcagcaggtctgtctacctgtaaaaccattgacatggaacttgtgaaaagaaagcgcatcgaggctatccgtgggcagattctgtccaagctgagattggcatcgccacccagccagggtgaggtgcctccaggcccactgccagaagcagtccttgcactttacaactcgacgcgcgatagagtggccggagaatcagcagaacctgagccagagccagaggctgactattatgcgaaggaggttaccagagtgctgatggtggaaactcacaacgaaatctacgacaagtttaagcaatcgactcactcgatctacatgttcttcaataccagcgaactgagggaggcagtgccggaacccgtgctcctgtctcgcgcagaactgcgcctgctgcgacttaagctgaaggtggagcaacacgtggaactgtaccaaaagtactcgaacaacagctggcgctacctgtctaacagacttttggccccatccgacagcccggaatggctttccttcgatgtcactggagtcgtgaggcagtggttgtcacggggaggcgagatcgaaggttttaggttgagcgcccattgctcctgcgattcgcgggacaacactcttcaagtcgacataaacggtttcactactggtcgcaggggcgaccttgcgactatacacgggatgaaccgtccgttccttctgcttatggcgacccctctggaaagagcgcaacatcttcagtcatcccggcacagacgcgcactcgacaccaactactgtttttccagcactgaaaagaactgttgcgtcaggcaactttacattgatttcaggaaggatcttggatggaaatggatccatgagcctaagggctaccacgcaaacttttgtttggggccatgcccgtatatctggtcgctggacacccagtactcgaaggtccttgccctgtataatcagcataatcctggggcgtccgccgccccgtgttgtgtgccacaagcccttgagcccctgcccatcgtgtactacgtgggtcgcaagcctaaagtggaacaactgtcaaacatgattgtcagatcctgtaagtgtagc

SEQ ID NO: 537 - DNA, 1170 bp, Artificial Sequence
  Description of Artificial Sequence: Synthetic Transcript Sequence
atgccgccgtcgggcctgcggctgcttcctctgctgctgccgctgttgtggctgctggtcctgacccccgggaggcccgcggccggactgtcgacgtgtaagacgatcgatatggagctggtgaaacgcaagcggatcgaggctatcaggggccagatcctttcgaaattgagacttgcctcgccgccgtcacagggcgaagtgccccctgggccgctgccggaggcagtgctggccctctacaactcgaccagggaccgggtcgccggcgagtcagcagagccggagccggaaccggaagccgactactacgccaaggaggtgaccagagtgctgatggtggagactcacaatgagatctacgataagtttaagcagtccactcattcaatctacatgtttttcaacacttccgagttgcgggaggctgtcccagaaccggtgctgctgagcagagctgaattgagactgttgcgcttgaaactgaaggtagaacaacacgtggaactgtaccagaagtattcaaacaattcatggcgatatctgtccaatcggctgctcgctccatcggattcgccagagtggctcagcttcgacgtgactggagtcgttcgccagtggctgtcgcggggcggtgaaatcgaaggtttcaggttgtccgctcactgttcgtgcgactcgcgggataataccctccaggtcgacatcaacgggttcactaccggacgccgcggggacctggctactattcacggcatgaaccgtcccttcctccttcttatggctactcccctggaaagggcccagcacctgcagagcagcagacatagacgcgccctcgataccaactactgtttttccagcaccgagaaaaactgctgtgtgagacagctgtacattgattttagaaaggatctcggctggaagtggatccacgagccaaaggggtatcatgcaaacttctgcctgggaccgtgtccatacatttggagcctcgacacccagtactcgaaggtcctggccttgtacaaccagcataatccgggagcttccgcggccccatgctgcgtgccgcaggcgctggaacctctgcctatcgtctactacgtgggacggaaaccgaaggtggaacagctgtcgaacatgatcgttcgctcctgtaagtgctcc

SEQ ID NO: 538 - DNA, 1170 bp, Artificial Sequence
  Description of Artificial Sequence: Synthetic Transcript Sequence
atgcctccttcaggactgcggttgttgccactgcttcttccactgctttggcttcttgtgctcacgcctggcaggcctgcagccggcctcagcacttgtaagactattgatatggaactcgtgaaacgcaagcgcattgaagcaatccggggtcaaatcctcagcaaactccgccttgcctccccaccatcccaaggagaggtgcctcctggacctcttcctgaagctgtgttggccctttacaactccacccgggatagagtggcaggtgaaagcgctgagccagaacctgaaccagaggcagattactatgctaaggaggttacgcgggtgcttatggtcgaaacccataatgaaatctatgataagttcaagcaaagtacccatagcatatacatgttctttaacacgtccgagcttagagaagccgtccccgaaccggtgctgctttcccgagcagaactcaggctcctccggctgaaacttaaggtggagcagcacgtcgaattgtaccaaaagtactcgaacaattcctggcggtacctttcgaatcggctcctggcaccatctgattccccagagtggctttccttcgacgtgactggcgtcgtcagacagtggctcagcagaggtggggaaattgaagggtttcgactctcagcacactgttcctgcgattcgagggacaatactctgcaagtcgacattaacgggtttacgactggtcgaagaggtgatttggcaactattcatggcatgaaccggccattcctgttgcttatggcaaccccactcgaaagagcccaacacctgcaatcctcgcgtcatagaagggcccttgataccaactactgcttctcgagtactgagaagaactgctgtgtgagacagctgtacattgattttagaaaggatctcggatggaagtggattcacgagcccaagggctaccatgccaacttttgtctcgggccttgtccttacatttggtcccttgacacccaatattccaaggtcctggccctctataaccagcataacccgggtgcgtcagcagcgccatgctgtgtgcctcaagcactcgaacctctgcctatcgtctactacgtcgggcgaaaacccaaggtggaacagttgtcgaacatgattgtgagatcctgcaaatgttcg

SEQ ID NO: 539 - DNA, 1170 bp, Artificial Sequence
  Description of Artificial Sequence: Synthetic Transcript Sequence
atgcccccttcgggcctccgcttgctgccactgctgttgccgcttctgtggcttctggtgttgactccggggaggccagccgctggcctcagcacttgcaagaccatcgacatggagctggtcaagcgaaagcggatcgaagccatccgcggacagattctttctaaactgcggttggcttccccacccagccaaggcgaggtgccgccgggcccgctgccggaagccgtcctcgccctttacaactccacccgagatcgagtcgcgggagaatcggccgaacccgaacctgaacctgaggccgactactacgcaaaggaggtgacgcgggtgctcatggtggagactcacaacgaaatctacgataagtttaagcagtcgacccattcaatctacatgtttttcaacacctccgagttgcgtgaagcggtccctgaaccagtgctgctctcccgtgcagagctgagactgctcaggctcaaactcaaagtcgaacagcatgttgaattgtaccagaaatactcgaacaactcctggcgctacctctcaaaccgccttctggcaccgtccgactccccagaatggctgtctttcgatgtcactggtgtggtgagacaatggctttcaaggggaggagaaatcgagggatttcgcctcagcgctcactgttcttgcgattcaagggacaacaccttgcaagtcgacatcaacgggttcaccacgggccggcggggagatctggcgactattcacggtatgaatcggccgttcctgctgctcatggcaactcccctcgaacgggcccaacacctgcagtcgtctcgtcaccgcagagcgctggacactaattactgcttctcatcaaccgagaagaactgctgcgtgcgccaactgtatatagacttccgcaaggacctgggatggaagtggatccatgagccaaagggttaccacgctaatttctgtcttggaccctgtccgtatatctggtcgctggacacccagtacagcaaagtgctcgccctgtacaatcagcataatcctggagcgtccgcggcaccttgctgtgtgccacaggcattggagcctctgccaatcgtttactacgtggggagaaagccgaaagtggaacagttgagcaacatgatcgtccgctcgtgcaagtgcagc

SEQ ID NO: 540 - DNA, 1170 bp, Artificial Sequence
  Description of Artificial Sequence: Synthetic Transcript Sequence
atgcccccgagcggacttcgcctgctgcctctgctgcttcctctgctctggttgctcgtccttaccccaggtagacctgcagccggtctttccacttgcaagactatcgatatggaactcgtgaagagaaagcgcattgaggccattagaggccaaattctctccaagttgcggcttgctagcccgccatcccaaggtgaggttccgccgggcccactgcccgaggcagtgcttgccctctataactcgacgcgcgatagggtcgctggagagtccgcggagcctgaaccggaacctgaggcggactattacgccaaggaggtgacccgagtgcttatggtggagactcacaatgaaatctatgataagtttaagcaaagcactcattcgatttacatgttctttaacacctcggaactccgggaagccgtgcctgaaccagtcctgctttcgagagccgagttgagactgctgcgcctgaaacttaaagtggaacaacatgtggaactgtaccagaagtacagcaacaactcctggcggtacctttccaatagactgcttgccccatccgacagccccgaatggctctcattcgatgtgaccggagttgtcagacagtggctgtcccggggaggagaaattgagggatttcggctgtccgcgcattgttcttgtgattcaagggataacaccctgcaggtggacattaacggttttacgaccgggagacgtggagatctcgcaactatccacgggatgaaccgcccttttctcctgctcatggccacccctctggaaagggcacagcacctccagagctcccggcacagacgggcactcgataccaattactgtttttcatccacggagaaaaactgctgcgtgaggcagttgtacatcgacttccggaaagatctcggatggaagtggattcatgagcctaagggctaccatgcaaacttttgcctgggaccatgcccatacatctggtcgcttgacactcaatatagcaaggtcctggcactgtataaccagcacaatccaggagcgtccgccgcaccctgttgtgtccctcaggccctggaacctctgcctattgtgtactacgtcggacgaaagccgaaagtggagcaactgtcaaatatgattgtgcgttcttgtaagtgtagc

SEQ ID NO: 541 - DNA, 1170 bp, Artificial Sequence
  Description of Artificial Sequence: Synthetic Transcript Sequence
atgcctcccagtgggttaaggcttttgcccctcctgctgccactcctgtggctgctggtgctcacacctggacggccggccgccggcctgtccacctgcaagacaatcgacatggaactggtcaagaggaaaaggatcgaagcgattcgaggccaaatcctcagcaaactgagactggcatcaccaccttctcagggagaagttcctcccgggcccctgcctgaagcagtgttagccctatacaactcaacgagggatcgtgtggccggcgaatcagccgagcctgagcccgagccagaagcggattactatgcaaaggaagtgacacgagtactgatggtggaaacacacaacgaaatctacgataagtttaaacaatcaacgcattcaatctacatgtttttcaacacgtccgagctgagagaggccgtgcctgaacccgtactgctctcccgtgcagagttgcggctgctgcggctaaagctgaaagttgaacagcacgttgagctgtatcagaagtacagcaataacagctggcggtatctaagcaataggctcctagcaccttccgacagccctgagtggctatcatttgacgttacgggagtagttcgccagtggctgagtagggggggcgagatcgaggggttccggctctcggctcactgctcatgtgattcgagagacaacaccctgcaggtggacattaatggatttacaaccgggcgtcgcggagatttggccacaatccatggcatgaatcggccttttctgctcctgatggccacccccctggagcgagcacagcatctgcagtctagtagacacagaagggccctcgatactaattactgtttctctagtacagagaagaactgctgcgttcgtcagctgtacattgactttcgcaaggatctggggtggaaatggatccacgaacccaaaggctaccacgccaatttttgcttaggaccatgcccttacatctggagcctggatacgcagtactctaaggtgctcgccctttacaaccaacacaatccaggagccagcgctgcaccttgttgtgtgccacaagcgctggagccactcccgattgtgtattatgttgggagaaaaccgaaggtcgagcaactgagcaatatgatcgtccgatcttgcaaatgctcc

SEQ ID NO: 542 - DNA, 1170 bp, Artificial Sequence
  Description of Artificial Sequence: Synthetic Transcript Sequence
atgcctccaagcggactccggctgttgcccctgctgttgccgctgctgtggctgctggtccttacccctggtcgcccagccgcaggcctgtcaacttgtaagaccatagacatggaactggtgaaaagaaagcgtattgaggcaataagaggccagattctctccaagctgaggcttgcatcgcctccgagccaaggagaagtgccccctggacccctgcctgaagccgtgctggcactgtacaactctacccgtgatagagtggcaggggagtcagcagaaccagagccagagcccgaagcggattactatgcaaaggaggtgaccagagttcttatggtcgaaactcataacgaaatctacgataagtttaagcagtcaacccatagcatttacatgttctttaacacttcagaactcagagaagcagtgccagagccggtgcttctctcgagggcagagcttaggctcctccgtctcaaactcaaggtggaacagcacgtcgaactctaccagaagtactcgaacaacagctggagatacctctccaatagacttcttgcaccttccgattcgccggaatggctgagctttgatgtaactggggtggtaaggcaatggctgtcacggggaggagaaatagagggatttcgcctctccgcccattgttcgtgcgacagcagagacaatacccttcaggtcgacattaacggattcactactgggagaaggggagatcttgcaaccatccacggtatgaaccggccatttcttcttctcatggccactccactcgaaagagctcagcacctccaatcctccagacatcgccgggcgctcgatacgaactactgctttagttcgaccgaaaagaactgttgcgtgcgccagctgtacatcgacttccggaaagatctgggctggaagtggattcacgagcctaaagggtaccatgcgaatttctgtcttggtccatgcccttacatttggagcctggacacccagtactcgaaggtgctcgccctgtacaaccagcataacccgggtgccagcgcagcgccatgttgtgtccctcaagcacttgaacctctgcctattgtctactacgtcggccggaaacctaaggtggaacaactttccaacatgattgtcagatcctgcaagtgttcc

SEQ ID NO: 543 - DNA, 1170 bp, Artificial Sequence
  Description of Artificial Sequence: Synthetic Transcript Sequence
atgccacccagtggcctccgactccttccgttgttgctcccactgttatggctcttagtgttaacaccaggtcggccggcggctggactgtccacctgcaagaccatcgatatggagctcgtgaaacgcaaacggatcgaagctattcgcggtcaaatcctgtcaaagttgcggcttgccagtccccctagccagggggaggtcccacctggtccactgccagaggcagttctcgctttgtataattctacacgggatcgggttgcaggggaatctgccgagccagagccggagccggaagccgactattacgcaaaggaggtgacccgagtgttgatggtggaaactcacaacgaaatatacgataagttcaaacaatctacccatagtatctatatgttttttaacacctctgaacttcgggaagccgtccccgagcctgtgctgctgtcgagagccgaactgcgtctgctcagactgaaactgaaggtggaacagcatgttgagttataccaaaaatatagtaacaactcttggcgctatttatcaaatagactcctggccccatcagactcaccagaatggctgagcttcgacgttactggcgtggtgaggcaatggctctcacgcggtggagagattgaagggtttcggctaagcgcccattgcagttgcgatagccgcgacaatacgctccaggtggacatcaacgggttcaccaccggacgcagaggggatctggccacaatccatggtatgaaccgcccatttctactcctgatggccacgccgttggaaagagcccaacacttgcagtccagtcgacatcgtcgagccctggacactaattattgtttttcttcgaccgaaaagaactgctgcgtccggcaactttacatagatttcaggaaagacctcggatggaaatggatccacgagcccaaaggatatcacgcgaatttctgcttagggccctgcccctatatatggtctttagatacccaatattccaaggtgctcgcactctacaatcaacataacccaggggcttcagctgcgccttgttgcgttccccaggccctggaacccctgccgattgtgtactacgtgggcagaaagccaaaggttgaacagctctctaacatgatcgtgcgctcttgcaaatgttcg

SEQ ID NO: 544 - DNA, 1170 bp, Artificial Sequence
  Description of Artificial Sequence: Synthetic Transcript Sequence
atgcccccgtcgggactgcgactgttgcccttgcttctgccgctgctgtggttgcttgtcctgacccccggtcggcctgcggccggcctgagtacctgcaagacaatcgatatggagctagtgaagcgtaaacggatcgaggccatccgtggccagatccttagtaagctgcgactggcgagtccaccgtctcagggcgaggtcccccccggacctttgccagaggcggtgctggcattgtacaacagcactagagacagagtcgctggagagtcggccgagccggaaccagagccggaggcagattactacgcgaaggaagtgactcgggtgctcatggttgaaacgcacaatgaaatctacgacaaattcaaacagtcgacgcacagcatctacatgttcttcaacacatccgaattgagggaagccgtacccgaaccggtgctgttgagccgagcggagttgcgtctgctgcgtctgaagctgaaggtggagcaacatgtagagctgtaccagaagtattcgaataactcgtggaggtatctaagtaatcggctgctggcaccctcggattcccctgagtggctgtccttcgacgtgacaggagtcgtgcggcaatggctctcgcgaggcggtgagatcgaaggttttagactctccgcccactgcagctgtgattcgcgcgataatactttgcaagtggatattaacggctttacgacaggcagacgaggtgatctggccacgattcatggaatgaatagacccttcctgttgctgatggcaacgccgctggaaagagcgcaacacctccagtccagcagacaccgacgcgcgctcgacaccaactactgtttctcttctaccgagaagaactgctgcgttcgtcagctttacatcgacttcagaaaggacctaggctggaaatggattcatgaacctaagggctaccatgctaatttttgcctaggaccatgcccttacatctggtcactagatactcagtactcgaaggtgttggcattgtacaatcaacacaatcccggagcgagcgccgcaccgtgctgcgtcccccaagcgctggagccattacccatcgtgtactatgtgggccgcaaaccgaaagtggagcaactgagcaatatgatagtacgctcctgcaagtgctcg

SEQ ID NO: 545 - DNA, 1170 bp, Artificial Sequence
  Description of Artificial Sequence: Synthetic Transcript Sequence
atgcctcctagcggactgcgcttacttccattacttctgcctctactgtggctgttagtgttaaccccaggtcgccctgccgccggccttagcacttgcaaaacgatcgacatggaattggttaagagaaagaggattgaggctatcagaggacaaatcctttcaaaattacgactggcatctcctccgagccaaggagaagtcccgcctggtcctctaccggaagctgttttggcactttataattctactagagatcgagttgcaggcgaatccgcagaacctgaaccggagccggaggctgattattatgctaaagaggttaccagggttttgatggttgaaacgcataacgaaatttacgacaagtttaaacagagcacccactcgatatatatgttcttcaatactagcgagctgagagaagctgtgccggaaccggtattactttctcgcgcagaactgcggctactgagattaaaacttaaggttgagcaacacgtagaattgtaccagaaatactcaaacaacagctggaggtacttgtccaacagacttttagctccgagcgactctccggaatggctttcattcgatgtcacaggagtagtgcgtcagtggttgtcccgcggcggagagattgaagggttcagactttctgctcattgcagctgtgactcacgtgataacaccctacaagtcgatatcaacggatttaccacaggacgccgcggtgatcttgcaacaattcacggaatgaacagaccctttttgctacttatggccacacctctggaacgcgctcaacacctccaatcatctagacatcgcagagcgttagacacaaattattgcttcagctctaccgaaaaaaactgttgcgttcgtcagctctacatcgattttcgtaaagatcttggctggaaatggattcatgaaccgaaaggatatcatgctaacttctgcttaggcccttgcccgtacatatggtcattggatactcagtactctaaagtccttgccctgtacaatcagcataaccctggtgcttctgccgcgccctgctgcgttcctcaggctctcgaaccactgcccatcgtctattatgtaggtcgcaaaccgaaggtcgagcaactcagcaatatgattgtccgctcatgtaagtgttct

SEQ ID NO: 546 - DNA, 1170 bp, Artificial Sequence
  Description of Artificial Sequence: Synthetic Transcript Sequence
atgcctccatccgggctgcggctgctgcctcttctcctaccattgttatggctcttggtgctgacaccgggacgccctgcagcaggtctgtccacatgtaagaccatagatatggagctggtaaagcggaaaaggattgaggctattaggggtcagatcttgtccaaactgcggttagcctctcccccttcgcagggagaggtcccacctggaccactgcctgaagcagttctggccctctacaattcgaccagagaccgggtcgcaggagagtccgccgaaccagagcctgaaccagaagcagactactatgccaaggaagtcaccagagtgctgatggtggagactcataatgagatctatgacaagttcaaacagtctacccacagcatctacatgttttttaatacaagcgagttgcgggaggccgttcctgagcccgtgctcctctctcgagctgaactacggctgttgaggctcaagctcaaggtcgagcaacacgtcgagctctatcagaagtacagtaataattcctggcgctacctcagtaatcgattactcgcaccaagtgactcccctgagtggcttagcttcgacgtgaccggggtggtgcgtcaatggttgagtagggggggagaaattgaaggattcaggctcagcgcccactgcagctgtgattccagagacaatactctgcaagtggacatcaacggctttaccaccggcaggagaggggatcttgccacaattcacgggatgaacaggcccttcctacttcttatggctactccattggagagggcccagcatttgcagagctcgaggcacaggcgagctcttgacacaaattactgttttagctccacagagaagaactgctgcgtgcgccagctttatattgatttcagaaaggatctcgggtggaagtggattcacgagcctaaagggtatcacgctaatttctgtttaggaccctgtccatacatctggtctctggatacccagtacagcaaagtgttggcgttgtacaatcaacataacccaggagcttcggcagcgccatgctgcgtgccacaggctctggagcctctccctattgtctactatgttgggaggaaaccgaaggtggagcagctgtctaatatgatagtgcggtcctgcaagtgttca

SEQ ID NO: 547 - DNA, 1170 bp, Artificial Sequence
  Description of Artificial Sequence: Synthetic Transcript Sequence
atgccaccaagcgggctgcggttactgccccttttactacccctactgtggttgcttgtcctgacccccggcaggcccgcagctggcctctccacatgcaaaacaatagatatggagctcgtaaaaagaaagcgtatcgaagcaatccgaggtcaaattttgtcaaaactgcggttggcctcccctccgagccagggcgaagtgccgcctggaccactgccagaagcggtcctggctttgtataattcaacccgcgaccgggtggctggagaaagtgctgagccagagccggaacctgaggcggactattacgccaaagaagttactagagttctgatggtggagacccacaacgaaatctacgacaaatttaagcaaagcactcacagtatatatatgttctttaatacaagtgagctgcgggaagccgtacctgaaccagtgctcctctccagagccgaactcaggcttctccggctcaaacttaaggtagaacagcacgtcgagctatatcaaaaatactccaataatagttggcgatacctgagtaaccgcctgcttgctccctcagattcccccgagtggttgtccttcgacgtcaccggagtggtgcgccagtggcttagccgggggggagaaattgaaggcttcagactgagcgcccactgcagctgcgatagccgcgataatacactgcaggtagatatcaacggctttactactgggcgaagaggggacttggccaccatccacggaatgaaccggccttttttactcttaatggctacaccactagagcgagctcagcaccttcaatcatcaaggcaccggcgggcgctcgatactaactactgtttctcgagcacggagaagaactgctgcgttagacagctgtacatcgactttcgaaaggatttgggttggaagtggatacatgaaccaaaaggctatcatgctaacttttgtctgggcccttgtccttacatttggtctctggacactcagtatagcaaagtgttagcactatacaaccaacacaacccgggggcttctgccgcaccttgttgcgtgccccaagcgctggagcctctccccatcgtgtactatgtcgggcgtaagccaaaagtggagcaattgtccaatatgatcgttcgaagttgcaaatgtagt

SEQ ID NO: 548 - DNA, 1170 bp, Artificial Sequence
  Description of Artificial Sequence: Synthetic Transcript Sequence
atgccaccaagtgggctacgcctactgccactcctcctcccactgctttggctgctggtactgacgccaggaaggcctgccgcaggtctgtccacttgtaaaaccatcgacatggagctggttaagcgcaaacgaatcgaggctattcgagggcagatactgtcaaaactgcggctggcttccccaccatcccagggtgaggttccccctgggccgctaccagaggccgtactggccctttataattcgactagagatcgcgtggctggagagagcgccgaaccagaaccggagcccgaggctgactactacgctaaggaagtgacccgcgtgttgatggtcgaaacccacaacgagatttacgataagtttaagcagtctacccacagcatatacatgttcttcaatacgagcgagctccgggaagcagtccctgaaccggtgctactctctcgggcggagttgaggctcctgcggctcaagctcaaggtggaacagcacgtcgaactttatcagaagtactcaaacaattcctggaggtacttgagtaaccgactcctcgcccctagtgattcccccgaatggctgtccttcgatgtgaccggcgtggtgcggcagtggctttctcgcggcggcgagatcgaagggttccggttgtctgcacattgctcatgcgactcccgagataacactctccaggtagacatcaacggctttactactggaagaagaggcgacctcgccaccatccatggcatgaacaggccatttctgctcctcatggccacccctcttgagagggctcagcacttgcagtcttcacgtcacagacgcgctttagacactaattactgtttctcatctacagagaaaaactgctgtgtacggcagctttatatcgatttcaggaaagatttggggtggaagtggattcatgagcctaaaggatatcatgccaacttttgtctgggaccgtgtccctacatctggtctctggatacacaatacagcaaggtcctggcactttacaaccaacataatcctggcgcaagcgctgctccatgctgcgtgccccaggcactggagcccctccccatagtctattatgttgggcgaaagccaaaagtcgaacagctgagtaacatgatcgttagatcatgtaagtgcagt

SEQ ID NO: 549 - DNA, 1170 bp, Artificial Sequence
  Description of Artificial Sequence: Synthetic Transcript Sequence
atgccgccaagtggactcaggttactgcctctcttactgcccctgctctggctgctggtactgacgccagggcgtccagccgctgggttgtctacctgcaaaaccatcgacatggaactcgttaaaaggaaacgcatcgaagccatcagggggcagatcctgtcaaagctgcgcctcgcaagtccacccagccagggcgaagtgcctccgggacctctgcccgaggcggtgctggctctctacaactctactagagatcgtgttgcaggcgagtcagcagagccagagcccgagcccgaagctgactattatgccaaggaggttactagggtgctgatggtggagacccacaacgaaatttacgacaagttcaagcaaagtacgcattccatttacatgttttttaacacctctgaactcagagaggctgtccctgagccagtgctgttgtctcgtgcagagctcaggctattgcggctcaagctgaaagtggagcagcatgtcgaactgtatcagaagtactccaacaattcttggagatacttatccaatcggctgttggctcctagcgactcacccgaatggctcagcttcgacgttaccggtgtggtgcgtcagtggctctccaggggtggagaaattgagggattccgcttgtccgcacactgctcctgcgactccagagacaatactctgcaggtggatatcaacggctttacgactggacgccgtggcgaccttgcgaccatccatggcatgaaccgaccatttctgctgctcatggcaacgccgctggagcgagcccagcaccttcagtctagtagacatcggcgcgcccttgatacaaattattgctttagcagtactgaaaagaattgttgtgtgaggcagctatacatcgacttccgaaaggacctgggctggaagtggatacatgagcctaaaggctaccatgccaatttctgtctgggcccttgtccatatatttggtccttggatacccagtattctaaagtgctggccctgtataatcaacataatcccggcgcttcagccgcgccatgttgcgtgcctcaggccttggaaccactcccaatcgtttattatgtgggccgaaaaccaaaagtagaacagctgtccaacatgatcgttcgctcctgcaagtgctct

SEQ ID NO: 550 - DNA, 1170 bp, Artificial Sequence
  Description of Artificial Sequence: Synthetic Transcript Sequence
atgcccccttccgggctaaggctcctgcctttgctccttcctcttctctggctcctagtgttgacaccaggaagacccgccgctggactttccacatgtaaaacaatcgacatggaactggttaaacggaaaagaatagaggcgatccgggggcagatactgtccaaactccgcctggcatctccaccatctcagggagaagtgccccccgggcctctacccgaagctgtcctcgcgctttataactccactagagatagagtcgctggagaatccgctgaacctgaacccgaaccagaagctgactattatgcgaaagaagttacaagagtgctcatggtggaaacacataacgagatatatgataaattcaagcagtcaacgcactcgatatacatgttttttaatacatctgaacttcgcgaagcggtacctgaacctgtgctactctctcgggctgaacttagattactgagactgaaactcaaagtggaacagcatgtggaactgtaccagaagtactcaaacaattcttggagatacctgtctaacagactactggctccgtccgattcaccagaatggttgagttttgatgtgactggagtcgtgcggcagtggctaagtcgagggggggaaatcgaagggtttaggcttagtgcccattgctcctgcgatagtcgagataacactctccaggtggatatcaacggattcacaacggggcgccggggggatctcgcaactatccacggaatgaatcggcccttcctgctcctgatggcaactcccctggaaagagcacagcatctacagtccagtaggcatcgacgcgctctcgatacaaactactgcttctcttctacagagaaaaattgctgtgttcgacagctttatattgattttcggaaagatctcgggtggaagtggattcatgaacctaaaggatatcacgctaacttctgccttgggccctgcccctacatatggtccttggatacacagtattctaaagtgctggctctatataaccagcataatcctggggcttcagccgctccatgttgtgttccccaggctctcgaaccccttccaatcgtctactatgttgggagaaaacctaaagtagaacaattaagtaacatgatagtaagatcctgcaaatgtagt

SEQ ID NO: 551 - DNA, 1170 bp, Artificial Sequence
  Description of Artificial Sequence: Synthetic Transcript Sequence
atgccgccgtcgggtttacgactattaccgttattattaccgttactatggttattagttctaacgccgggtcgaccggcggcgggtttatcgacgtgtaaaacgatagatatggaactagtaaaacgaaaacgaatagaagcgatacgaggtcaaatattatcgaaattacgtctagcgtcgccgccgtcgcaaggtgaagtaccgccgggtccgttaccggaagcggtactagcgctatataattcgacgcgagatcgagtagcgggtgaatcggcggaaccggaaccggaaccggaagcggattattatgcgaaagaagttacgcgtgtattaatggtagaaacgcataatgaaatatatgataaatttaaacaatcgacgcattcgatatatatgttttttaatacgtcggaattacgtgaagcggtaccggaaccggtattactatcgcgagcggaactacgtttactacgtctaaaattaaaagtagaacaacatgttgaactatatcaaaaatattcgaataattcgtggcgttatttatcgaatcgactattagcgccgtcggattcgccggaatggttatcgtttgatgtaacgggtgtagtacgtcaatggctatcgcgaggtggtgaaatagaaggttttcgactatcggcgcattgttcgtgtgattcgcgtgataatacgctacaagttgatataaatggttttacgacgggtcgtcgtggtgatctagcgacgatacatggtatgaatcgtccgtttttactactaatggcgacgccgctagaacgagcgcaacatttacaatcgtcgcgtcatcgacgtgcgctagatacgaattattgtttttcgtcgacggaaaaaaattgttgtgtacgacaattatatatagattttcgtaaagatttaggttggaaatggatacatgaaccgaaaggttatcatgcgaatttttgtctaggtccgtgtccgtatatatggtcgttagatacgcaatattcgaaagtattagcgttatataatcaacataatccgggtgcgtcggcggcgccgtgttgtgttccgcaagcgttagaaccgttaccgatagtttattatgttggtcgtaaaccgaaagtagaacaactatcgaatatgatagttcgttcgtgtaaatgttcg

SEQ ID NO: 552 - DNA, 1170 bp, Artificial Sequence
  Description of Artificial Sequence: Synthetic Transcript Sequence
atgccccccagcggtttgcgactgttaccattacttctgcccctgttgtggctgttggtcctaactcctggtagaccggcagcaggtctatcgacctgtaagactattgacatggaattggtaaaaaggaaaaggattgaggcgatccggggccaaatactgagtaaacttcgactggcatctccaccatctcagggcgaagtgccacctggtccactgcctgaggcggtgctggcattgtataatagcaccagagatcgagtggccggcgaatccgccgagccggagcccgagccagaagctgattattacgcaaaagaggtgacgcgtgtcctgatggtagaaacccacaacgaaatctacgacaagttcaaacaatccacccactccatctacatgtttttcaacacctcagaacttcgggaggccgtgcctgagcctgtgctgctatcaagagccgaattaaggttgctcaggctgaagcttaaggtcgaacaacacgttgaactgtaccagaagtacagcaataactcctggcgatacctgtcaaaccgactgttagccccctcagactccccagagtggctctcctttgacgtaactggggtggtgaggcagtggctgtccaggggcggtgagatcgaaggattccgattatccgctcattgttcatgcgactcaagggacaatacactgcaagtggatatcaatgggttcactacaggacgtagaggcgatctggccacgatacacggaatgaacagaccgtttctactattaatggccactccattggaaagggcccagcatctccaaagttctcgacaccggcgagcactggacaccaattactgttttagtagtacggagaaaaattgttgtgtacgacagctgtacatcgacttcagaaaggacttgggatggaaatggatccatgaaccaaagggctaccacgcaaatttctgcttagggccatgtccttacatctggtctctggacacccaatattctaaggttctggctctttacaatcaacacaaccccggcgccagcgcagctccgtgctgtgtgcctcaagcactggagccattgcctatagtgtactacgttgggcgtaagcccaaagtagaacagttatctaatatgattgtccgttcctgtaagtgtagc

SEQ ID NO: 553 - DNA, 1170 bp, Artificial Sequence
  Description of Artificial Sequence: Synthetic Transcript Sequence
atgccaccgtcgggtttgcgtttgctgccacttttgctgcctctcttgtggcttctcgtgctcacgcccggtcgccctgcggccggactttcgacgtgcaaaactatcgatatggaactggtaaaacgaaagagaatcgaggctattagaggccaaatcctttcgaaactgcgcttggcgtcaccaccttcgcagggagaagtgcctccggggccactccccgaggcagttctcgcactctacaactcgacgcgagatcgcgtggcaggcgaatccgctgaaccggaacccgagcctgaagcggattactacgccaaggaggtcactcgagtcctgatggtggaaactcataacgagatttacgacaagtttaagcagagcacccattccatatacatgtttttcaatacctcggaacttcgagaggccgtaccagaaccagtgctgctttcccgcgctgaacttagacttctgcgcctgaagctgaaagtggaacaacacgtcgagctgtatcaaaagtactcaaacaattcgtggcggtatctgagcaaccgtcttttggccccctcagactcccctgaatggctgtccttcgacgtgaccggagtcgtccggcagtggctgtcgcgaggaggagaaatcgaaggatttaggctgtccgcgcattgttcctgcgatagtagagataatactctgcaagtggacattaacggtttcaccaccggacggagaggcgatctggcaaccatacatggtatgaacaggccttttctgcttctgatggcaacgccgctcgaacgggcccaacatttgcaaagctccaggcatcgccgagcactcgatactaattactgtttttccagcactgagaagaattgctgtgttcggcagctctacattgactttagaaaggatctgggttggaaatggattcacgagcccaaagggtaccacgcaaacttctgcctgggaccatgtccttatatctggagtctggatacccagtactcaaaggtcctcgcactgtacaatcagcacaaccctggagcatcggccgcaccatgttgtgtgccccaggcactggaaccccttcctatcgtgtactacgtgggcagaaagccaaaagtggagcaactttcaaacatgattgtccggtcgtgtaagtgctcg

SEQ ID NO: 554 - DNA, 1170 bp, Artificial Sequence
  Description of Artificial Sequence: Synthetic Transcript Sequence
atgccaccctcaggcctgagattgctgcccttgcttttgccactcttgtggctgctggttcttacccccgggaggcctgcagcaggattgagcacctgcaaaactattgacatggaactggtgaaaagaaaaagaattgaggcaattcgcggccagatcctgagtaaacttcggttggcatcccccccttcacagggggaagttcccccaggacctcttcctgaagccgtgctggctctgtacaatagcactagagacagagtggccggcgagagcgctgaaccagaaccagagccggaggccgattactacgccaaagaggtaacacgcgtactgatggtggagacgcataacgagatttacgacaagttcaaacagagcacccactccatctacatgttcttcaacacaagtgaactccgagaagctgtcccagagcctgtgcttctgtctagagctgagctcaggcttctgcggcttaaactcaaggttgagcagcacgtggagttgtatcaaaagtattcaaataattcctggcgctatctcagcaatcgcctgctcgctcccagtgactcacccgagtggctgtccttcgacgtcactggagtggtccggcagtggctgagccggggtggggaaatcgagggcttcaggctgagcgcacactgctcatgtgactctcgcgataataccttgcaggtggacataaatgggttcacaacagggcgcaggggggatctggcaaccatccacggtatgaacagaccctttcttctccttatggcaactccgcttgaaagggctcagcacctgcagtcaagccgccacagacgcgccctcgataccaattattgcttctccagtactgagaaaaattgttgtgttcggcagttgtatattgattttcggaaagacctggggtggaagtggatccacgagccaaaaggctaccacgccaacttttgcctgggtccctgcccgtacatatggtccctggacactcaatattctaaagtcctggcactctacaaccagcacaaccccggagcttccgcagctccatgttgtgtgccccaggctctggaacccctgcccatcgtgtactacgtgggtcgaaaacctaaagtcgagcaactcagcaatatgatcgtgcggtcctgtaaatgctct

SEQ ID NO: 555 - DNA, 1170 bp, Artificial Sequence
  Description of Artificial Sequence: Synthetic Transcript Sequence
atgccgccgagcggactcaggctcttgccgctgctgctgcccctcctttggctgctggtgctcaccccaggacgccctgccgccggactgagcacctgcaagactattgacatggaactggtcaaaaggaagaggatcgaggcgatccggggacagatcctgagcaagctgcgcctggcttcgccgccatcacaaggagaagtgccgccaggaccactgccggaagctgtgctggcactgtacaacagcactagagatcgggtggcaggcgaaagcgcagaaccggaacctgagccggaagctgattactacgccaaagaagtgaccagagtgctgatggtggaaactcacaacgaaatctacgacaaattcaagcaatcgactcattcgatctacatgttcttcaatacctccgagctcagagaggcagtgcctgagccggtgctgctgtcaagagcggaactgcgcttgctgcggctgaagctgaaggttgaacaacatgtggagttgtaccaaaagtactccaacaacagctggaggtacctgtccaatcgcctcctcgcgccgtcagactcaccggaatggctctcgttcgacgtgactggagtggtgcgccagtggctgtcgcggggcggcgagatcgaaggcttcaggttgtcggcacactgttcatgtgattcgcgggacaacactctccaggttgacatcaatggattcaccacggggcgccgcggtgatttggcaaccatccacggtatgaacagaccattcttgttgctgatggctaccccgcttgagagggcgcaacacctccagtcgtcccgacatagacgggcacttgacaccaactactgcttctcaagcaccgagaagaattgttgcgtccggcagctctacatcgatttccggaaagatctgggatggaaatggatccatgaaccgaaggggtatcacgcaaatttctgcctgggaccgtgtccatacatctggtccctggacacccagtatagcaaagtgctggctctttacaatcagcataaccctggagcttccgctgccccttgctgcgtgccacaagcccttgaacctcttccgatcgtgtactacgtcggcaggaagccaaaagttgaacaactttcgaacatgatcgtgcggtcgtgcaagtgctcc

SEQ ID NO: 556 - DNA, 1170 bp, Artificial Sequence
  Description of Artificial Sequence: Synthetic Transcript Sequence
atgccgccgtccggcctgaggctgctgccgttgttgctgccgctgttgtggcttctcgtgcttaccccgggacggcccgcggcggggctgtcgacctgcaagacgatcgatatggagctggtgaagcgcaaaagaattgaagctattcggggacagatcctgtccaaacttcgactggccagcccgccgagccaaggagaggtccccccggggccgctgccggaagcggtactggccctgtacaattcaacccgcgatcgagtggccggagagagcgcagaaccggaacccgaaccggaggccgattactacgctaaagaagtcacccgcgtccttatggtcgaaactcacaatgagatatacgacaagttcaagcagtcaacccactcaatctacatgtttttcaacacttccgagttgcgcgaagccgtgccggaaccagtgctgctgtcgcgggccgaactcagactgctgcgcctgaagctgaaggtcgaacagcatgtggaactttaccagaagtacagcaataactcgtggcggtacctcagcaaccggctgctggccccttcggactccccagagtggcttagctttgatgtgactggagtggtgaggcagtggctgtccagaggaggggagattgaaggattccggctgtcggcccactgctcctgcgacagtagagacaatactctgcaagtggatatcaacggattcaccactggtcggcgcggggatcttgcaaccattcacggcatgaaccggccgtttctgctccttatggcaaccccgttggaaagggctcagcacctgcaatcgtcgcgacatcgcagagccttggatactaactactgcttctcatcgactgagaaaaactgctgtgtgcgccagctgtatatcgatttccggaaggacctcggatggaagtggatccatgaaccgaaaggataccatgcaaatttctgccttgggccgtgtccatacatctggtcactcgacactcagtactcaaaagttctcgcgctgtataatcagcacaacccgggagcgtcagcggccccgtgctgcgtcccacaagccctcgagcctctgccaatcgtttactacgtggggcgaaagcctaaagtggagcaactcagcaacatgatcgtgagatcctgcaagtgctcg

SEQ ID NO: 557 - DNA, 1170 bp, Artificial Sequence
  Description of Artificial Sequence: Synthetic Transcript Sequence
atgccacccagcggactgcgtctgttgcctcttctcctgccgctgctctggcttctggtccttactccaggccgtcctgcagcaggactgtccacctgtaagaccattgatatggagctggtgaagcgaaaacgtattgaagctattcgcggacagatcctgtcaaagctcaggctggcatccccgccatcccagggtgaagttcctccggggcccctgcccgaagcagtgcttgcactctacaactcaaccagggatcgagtggccggtgaatccgctgagcctgaacccgaacccgaggcggattactacgcaaaggaagtgacccgggtccttatggtcgagactcacaacgagatttacgataagttcaaacagtcaacgcactccatctacatgttctttaacacgagcgagctgagagaagccgtgccagaacctgtgcttctgtcccgcgccgagctgcggcttctgcggctgaagctcaaagtggaacaacacgtggaattgtaccagaagtacagcaacaattcatggcgatacctcagcaaccgccttctggctcctagcgattcgcctgaatggctgtcctttgatgtgaccggagttgtgcgtcaatggctgagccggggaggagaaattgaaggttttcggctgtccgcgcattgttcgtgtgattcacgcgataataccctccaggtggatatcaacggtttcactaccggacggcggggcgatcttgcaactattcacggaatgaacaggccttttcttctcttgatggcaactccacttgaaagggcgcaacacctgcagtcctcgcgccatagacgggcactggataccaattactgtttttcgtccaccgaaaagaactgttgtgtgcgtcagctgtacattgatttcaggaaagaccttggctggaagtggatccacgagcctaagggctaccatgcaaacttctgtcttggtccatgtccctacatctggtcccttgacactcagtactcaaaggtgctggcactgtacaatcagcataatcctggcgcaagcgcagcgccatgctgcgtgcctcaagccctggagccgctccctatcgtgtactacgtcgggcgcaagcctaaagtcgagcagttgtcgaatatgatcgtgcgctcgtgcaagtgtagc

SEQ ID NO: 558 - DNA, 1170 bp, Artificial Sequence
  Description of Artificial Sequence: Synthetic Transcript Sequence
atgcccccaagtggactgaggctgctcccgttgctcctgcctctgctgtggctgctggtactcacacccggccgcccagcagccgggctttcaacatgtaagacaatagatatggaactggtgaaaagaaagcgcatagaagccattcgcgggcagatactttcaaagcttcggctggccagtcctccatcccagggagaggtcccccctggacctctgccagaggctgtgctggcgctgtacaactctactagggatcgggtcgccggagagtccgcggaacccgagccagagccagaggccgattactacgcaaaagaggtgacccgggtgttaatggttgagacacacaacgagatttacgacaaatttaagcagagcacccattcaatttacatgttttttaatacctctgaactaagggaggcggtgccagagcccgtgctgctgtctagggccgagctacggttgctgcggctcaagctcaaggtggaacagcacgtcgagctgtatcaaaaatatagcaacaattcatggcggtacttgagtaataggctgttagcaccgtccgactcccccgagtggctgagcttcgatgtcaccggagtggtgcgccaatggttgtccagagggggtgaaatcgaaggattcagactgtcagcccactgttcatgcgatagccgtgataataccctccaggtcgacataaatggcttcaccacaggcaggcgcggggatcttgcgactatccatgggatgaaccgaccctttttgctgttaatggcaactccactggagcgagcccagcatcttcagtcctcacggcacaggcgggctcttgacacaaattactgcttcagctctacggaaaagaattgctgcgtgagacaattgtacatcgattttcgtaaggacctcggctggaaatggatccatgagcctaaggggtatcatgccaacttttgcttgggtccatgtccgtacatttggtcactggacactcagtactctaaagtactggcactctacaaccaacacaatcctggcgccagcgccgccccctgctgcgtcccccaagccctggaacccctgccaatagtttactatgtgggacgcaaaccaaaagttgagcagctgtccaacatgattgtcaggtcctgcaagtgcagc

SEQ ID NO: 559 - DNA, 1170 bp, Artificial Sequence
  Description of Artificial Sequence: Synthetic Transcript Sequence
atgccaccatccggcttgcgcctgctgcctctgcttcttcctctgctctggctattagtgctgacaccaggacgtcccgccgccggtctgagcacctgtaaaacgattgatatggagctcgtgaaaaggaaacgtattgaagccattcgtggacagatcttgtcaaagctgaggctagcgagcccacctagtcagggggaggtgcctccgggtcctttgcccgaggccgtgctcgccctgtacaactcaacccgcgaccgtgttgctggggaaagcgcagagcccgagcccgagcccgaggccgactactatgctaaggaggtgactcgagtactgatggtcgagacacacaacgagatctatgacaaatttaagcagagcacacatagtatttatatgttcttcaacacttccgagctgagggaagccgtgccagagccggtgctgctgagtagagcggagctgcgactactgagattgaagctcaaagtcgaacagcacgtagagttgtatcagaagtacagtaataattcgtggcggtatctgagcaatcgcttgctagctccttcagattcacccgagtggttatcatttgatgtgaccggtgttgtacggcagtggctgagccgaggcggggaaatagagggattccgcttatctgctcattgctcctgtgatagtagggacaatacccttcaggtcgatataaatggatttactacagggcgccgcggcgacctggccactatccacggaatgaaccgtcctttcctgctgctgatggctaccccactagagagggcacagcatttgcagagtagccgccaccgacgagccctcgacactaactactgtttcagttctactgagaagaattgctgtgtgagacagttgtatatcgatttcaggaaggacctggggtggaaatggattcacgaaccaaagggataccacgctaacttctgtctggggccatgcccctacatttggagcctcgatacccagtacagcaaggttctagctctgtataaccagcataatccaggagccagtgccgctccatgctgtgtgccacaagctttagagcccctgcccatagtgtactatgtggggcggaaaccaaaagtggagcagctgagcaacatgatcgtgcgctcttgcaaatgcagt

SEQ ID NO: 560 - DNA, 1170 bp, Artificial Sequence
  Description of Artificial Sequence: Synthetic Transcript Sequence
atgccaccaagcgggctgcggcttcttccacttctgcttccgctcctgtggctgcttgtgcttactccaggacgtcccgcggccggcctttccacctgcaaaactattgatatggagcttgtgaagcgcaaaagaattgaagcaattagaggtcagatcctgtccaaacttaggctggcatccccaccaagccaaggggaagtgcctcccgggcctctgcctgaagcagtgctggcgctgtacaactccaccagagatcgagtcgcaggagagagcgccgaacctgagcctgaaccggaggctgactactacgctaaggaagtcaccagagtgctgatggtggagactcacaatgagatttacgacaaattcaaacaaagcacgcactccatttacatgttcttcaacacctcggaactgcgggaggccgtgccagagcccgtcctgctgtcaagggcggaactgaggctgctgcgactgaagctgaaggtagaacagcacgtcgagctttaccagaaatactcaaacaactcatggcgatacctctccaatcgcctcctggcaccatcagattcgcctgaatggctttcatttgatgtcactggagttgtgagacagtggctctcaaggggcggagaaattgagggttttagactttcggcgcattgttcgtgtgattccagagataatactcttcaagtggatatcaatggtttcaccactggacggcgcggtgaccttgccaccatccatggaatgaacagaccttttctccttcttatggcaactcctcttgagagagcacaacatctgcaaagcagccgacaccggcgcgcgctggataccaactattgtttctcatcaactgaaaagaactgctgcgtccgacagctttacattgattttcggaaggatctgggatggaagtggatccatgagccaaagggctaccatgcgaacttctgcctcggaccttgtccatacatttggagcctcgatacgcagtactctaaggtcctggccttgtataaccaacataatcctggggcgtccgccgcgccttgctgtgtgcctcaagccctggagccgctgcctatcgtgtactacgtcggaagaaagccaaaggtggaacaattgtcaaacatgatagtgcggtcctgtaagtgttcg

SEQ ID NO: 561 - DNA, 1170 bp, Artificial Sequence
  Description of Artificial Sequence: Synthetic Transcript Sequence
atgccaccaagtggacttcgcctgctaccacttttactgccgctcctttggttattggttcttacaccaggacgcccagcggctggattgtcaacttgcaaaacgatagacatggaacttgttaaaagaaagcgaattgaagctatacgtggacaaattctatcgaaacttcgcctcgcatctccaccatcccaaggcgaagtgccaccaggaccgctcccagaagcagttcttgcgctctacaactcgacacgggaccgagtggctggggaatctgctgagccggaaccggagcctgaggctgactattatgcaaaggaggtgactcgtgtattgatggttgagacacacaatgagatttacgataaattcaagcaatcaacgcacagcatctacatgttttttaatacatcagagttgcgtgaagctgtgccggagccggttttgctgtcgagagctgaactcagactgttgcgtttaaaacttaaggttgagcaacatgttgagttgtaccaaaaatattcgaataattcttggagatacttgtctaatcgattgctggctccatcagatagcccagagtggctgtctttcgacgtgaccggagttgttcgtcagtggctttcaagaggaggagaaatcgaaggattccgtttgtcggctcactgctcatgtgattctcgagataacactttgcaggttgatatcaatggtttcactaccggcagacgcggagatcttgctacaattcatggaatgaatcgtccattcctccttcttatggcaacgcctttggagcgggctcaacacttgcaatcctcacgtcacagaagagctttggatacaaattactgtttttcgagtacggagaaaaattgctgtgttcgacagttgtacatcgattttcgtaaagatcttggatggaaatggattcatgaaccaaagggttaccatgcgaatttctgccttgggccctgcccttacatttggagtcttgatactcaatacagtaaagtccttgcgctttataaccagcataacccaggagctagtgcggccccatgttgtgtaccacaggccttggaaccactcccgattgtatactatgtgggacgaaagccaaaagttgaacaactgtcaaatatgattgttcgaagttgtaaatgttcc

SEQ ID NO: 562 - DNA, 1170 bp, Artificial Sequence
  Description of Artificial Sequence: Synthetic Transcript Sequence
atgccaccttcgggtctgagactgctgcccctcctcctcccgctgctttggttgctggtgctcacccccgggcgtcctgctgctggattgtcgacttgtaagaccatcgatatggaactggtcaagagaaaacgcattgaggcaatccgcggtcagatcctttctaagctgagactggcgtccccaccatcgcagggtgaggtgcccccgggacccttgccggaggccgtgctcgcgctctacaactccacgagagatcgggtggccggagagtcggctgaaccagaaccagagccagaagccgactactacgccaaagaggtcacccgtgtgctcatggtcgagacgcataacgaaatctacgacaagtttaaacagtcgacccattcgatttacatgttcttcaacacctcggaactgcgggaggccgttccggagccagttctgctgtcgcgggccgagctgcggttgctccggctgaagttgaaggtggagcaacacgtggagctgtaccaaaagtactccaacaattcctggcggtacctgtcgaacaggctgctcgcaccatcggattcccctgagtggctgtccttcgatgtgactggcgtcgtgagacagtggctcagcagaggaggagaaatcgaggggtttcgactgtcggctcattgttcttgcgattcccgggacaacacgttgcaagtcgacatcaatggatttactactggccggaggggggacctcgccacgattcacggcatgaacagacccttcctcctgctcatggcaactccgctggagcgcgcgcagcatcttcaatcatcccgccaccggcgggcacttgacactaactactgcttctcatccactgaaaagaactgctgcgtgcggcaactttacatcgacttcaggaaagaccttggatggaagtggatccacgaaccaaagggctaccatgcaaacttttgtctgggcccctgtccgtacatctggtccctggacacccagtactcaaaagttctggcgctctacaatcagcacaatccgggagcgagcgctgcgccatgctgcgtgccacaggctctcgaaccgctcccgatcgtgtactacgtcggacggaagcctaaagtcgaacagttgtcaaatatgattgtgcgctcctgtaaatgttct

SEQ ID NO: 563 - DNA, 1170 bp, Artificial Sequence
  Description of Artificial Sequence: Synthetic Transcript Sequence
atgcccccgtccggactgcgcctgctgccgctgcttcttccactgttgtggctcctggtgctcactccaggccggcccgccgctggcctctcgacttgcaagaccatcgatatggagttggtgaagagaaagaggatcgaggctatcaggggtcagatcctttccaaactgcgacttgcttcgccgccttctcaaggggaggtcccgcccggcccgctccccgaggccgtcctcgctctttacaatagcactcgggatcgggtggccggagaatcagcggaacctgaacctgaaccagaagccgactactacgcgaaggaggttactcgcgttctcatggtggaaacgcacaatgagatatacgacaaattcaagcagtcaacccattcaatctacatgttcttcaacacttccgaactgagggaggccgtgccggagccggtccttctttcacgcgccgaacttcgcttgctgagactcaaactgaaagtggaacaacatgtggaactgtaccagaaatactccaacaactcgtggcgctatctgtcaaaccgcctcctggccccgtcggatagcccggaatggctgtcatttgatgtgaccggggtcgtcagacaatggctctcgagagggggcgaaatcgagggattcagactgagcgctcattgctcgtgtgacagccgcgacaacacgctgcaggtggacatcaacgggttcaccactggcagacgcggcgatctggcaaccatccacgggatgaatcgccctttcctcctcctgatggcgacgccacttgagagagcgcaacacctgcaatcgtcaagacaccgccgagcactcgatacgaactactgctttagcagcaccgaaaagaattgctgcgtgcgccagttgtacatcgactttcggaaggatttgggatggaagtggatccacgaaccgaagggttaccacgcgaacttctgtctgggaccatgcccatatatctggtcgctcgacactcaatactccaaggtgctggccttgtacaaccagcataacccgggagcctccgcggcaccgtgctgcgttccccaagccctggaaccattgcctattgtgtattacgtcggccggaagccgaaggtcgagcagctgtccaatatgatcgttagatcttgtaaatgttcc

SEQ ID NO: 564 - DNA, 1170 bp, Artificial Sequence
  Description of Artificial Sequence: Synthetic Transcript Sequence
atgccaccttcagggttgaggctgttgccgctgttacttcctcttctctggctgcttgtactaactcctgggcggcctgccgccgggctaagtacctgcaaaaccatcgacatggaactggtcaagcgcaagaggatcgaagcgattcgaggtcaaatactcagtaagctacgactcgcctctccacctagccagggagaggtgcctccggggccacttcccgaggccgtgctggccttgtataactcaacccgcgatagggtggcgggcgagtccgcagagccagagcctgagcccgaggccgattactacgcgaaagaggtgacaagggtcctgatggtcgaaacccacaatgaaatctacgataaattcaagcagagcactcattctatttatatgtttttcaacacctcagagttgagggaggcagtgcctgagccggttcttctgagccgggctgagctgaggctcctgcgtttgaagctgaaagtagagcagcacgtggagctgtatcagaagtacagtaataactcatggaggtatttgagtaatcgtctgttggcccccagtgattcccctgagtggctgtctttcgatgttacaggagtggtgaggcagtggctgtcccgtggcggcgagatcgaaggctttcgactgtccgctcattgttcctgcgatagcagagacaacacactgcaggtggacatcaatggctttacaactgggcgcaggggcgacctcgccacaattcacggaatgaaccgacccttcctactgctgatggccacacctctggaacgagctcaacacctccagagctctaggcacaggagagcgctcgataccaactattgtttcagctccaccgaaaaaaactgctgcgtccgccagctttacatcgacttccgcaaggacctgggctggaagtggattcatgaacccaagggttaccacgcgaacttctgtcttggcccatgcccctatatctggagcctcgatacacagtatagcaaagttctggctttgtataatcagcataaccctggtgcttcagccgccccctgctgtgtaccacaggctttggagcccctgccaatagtgtactatgttgggcgaaagcccaaagtggaacaactttcaaacatgattgtgaggagttgtaaatgttcg

SEQ ID NO: 565 - DNA, 1170 bp, Artificial Sequence
  Description of Artificial Sequence: Synthetic Transcript Sequence
atgcccccatctgggctacgcctgttacccctgctgctgcctctgctctggctgttggttctcacccccggtaggcctgctgccggtctctctacctgtaaaacgattgatatggagctggtgaagcggaaaaggatagaagccatccgcggacagatcctgagcaaactgaggttggcctctcctcctagtcagggggaggtgccccctggtccccttcctgaagcagtgctggctctgtataactcgacaagagatagagtcgcaggggagtccgcggagccagagccagagcctgaagctgactattacgccaaggaggtgaccagggtgctgatggtggagacacacaatgaaatatacgacaagtttaagcaatctacccacagtatctacatgttcttcaacacgtcagagctgcgagaagcagtgccagagcccgtcctcctgtcccgggccgaactgaggctcttgcggctgaagcttaaggtagagcagcacgtggagttgtaccagaaatacagtaacaactcttggcggtacctgtcaaatagactgctcgccccctctgactcgcccgaatggctcagttttgacgtgaccggagtagtgcgtcagtggctatcccgaggaggagaaattgagggcttcagactgagtgcccactgcagctgtgacagccgtgataatacgttacaggtggatatcaatggctttactaccggacgccggggggacctcgcaaccatccatggcatgaatagacccttcctgcttctcatggcgacacccctcgagcgtgcccagcacttgcaaagctcacggcacagacgcgcccttgacacaaattactgcttttcatctacggagaagaactgctgtgtgcggcagctgtacatagatttcaggaaggacttgggctggaaatggatccacgaaccaaagggatatcatgctaatttctgcctgggtccctgcccgtacatctggagcctggacacccagtatagcaaagttttggcactctacaatcagcacaaccctggagcgtccgctgcgccatgttgcgttccgcaggcactggagcctctccccattgtgtactacgtgggcaggaagccgaaggtggaacagcttagtaatatgatcgtacgctcatgcaagtgctca

SEQ ID NO: 566 - DNA, 1170 bp, Artificial Sequence
  Description of Artificial Sequence: Synthetic Transcript Sequence
atgccaccttcggggctgcgcctcttgccacttctcctgccgctcctttggcttttggtgttgactccaggtagaccggccgcgggactctcaacctgcaagacgatcgatatggagctggttaaacgcaagcgaatcgaggcaatccggggacagatcctctccaaacttaggctggcctcgccaccgagccagggagaggtgcctccgggaccgctgccggaggcggtgctggcgctgtacaactcaacccgggatcgcgtggccggcgagagcgcggagcctgaaccggaaccggaagcggactactacgcgaaggaagtgacccgcgtcctgatggtggaaacccataacgaaatctacgacaaattcaagcaatccacccacagcatctacatgttcttcaatacctcggagctgcgcgaagcagtgccggagcctgtgctgctctcccgcgcggaactcagactgctgagactgaagctcaaagtcgagcaacacgtggaactgtaccagaagtactctaacaactcctggcggtacctttccaaccggctcctcgcaccgtccgattcaccggaatggttgtcgtttgacgtcaccggtgtggtcagacagtggctgtcacggggaggcgaaatcgaaggcttccggctttcggctcattgctcatgcgattcacgcgacaataccctgcaggtggacatcaacggattcacgaccggtcggcggggcgacctggcgacgatccacggaatgaatagaccgttcctgctgttgatggctacccctctggagcgggcccagcacctgcaaagcagcagacacagacgggccctcgacactaactactgtttctcaagcaccgaaaagaactgttgcgtgagacaactgtacatcgacttcaggaaggacctgggatggaagtggatccacgaacccaaggggtaccacgccaatttctgcctgggaccatgcccatacatctggtcactggacactcagtacagcaaagtgctggccctgtacaatcaacacaacccaggagcttcggctgccccgtgctgtgtgccacaagccctggaacctctgccaatcgtgtactacgtgggaagaaagccaaaggtggagcaattgtccaacatgatcgttaggtcgtgcaagtgcagt

SEQ ID NO: 567 - DNA, 1170 bp, Artificial Sequence
  Description of Artificial Sequence: Synthetic Transcript Sequence
atgcccccaagcgggcttcgcctgctgccccttctcctgcctctcctgtggctgctggtgctgactccgggcaggcctgcagccgggctctccacttgcaagaccattgatatggagctcgttaagaggaaacgcatcgaggctatccgagggcaaatcctgagcaagttgcgattagcttctcccccttcacaaggggaagtgcctccaggccccctgcctgaggcagtacttgccctgtataattcaacgcgggatagggtcgcgggcgagagtgctgagccggaacccgagccagaagctgattattacgcaaaggaagtaaccagggtattgatggtggaaactcataatgagatttacgacaagtttaagcaaagtacacatagcatctacatgtttttcaatactagcgagctacgggaggctgtcccagagcctgtgctgcttagtagggccgagcttaggcttttacgcctgaagctgaaggtcgaacaacacgtggagctgtatcagaaatatagcaacaactcttggcgctatcttagcaaccggctcctggccccctcagattctcccgagtggctgtcgtttgacgtaactggagtcgtcaggcagtggctgtccaggggaggagaaatagagggcttcaggctttctgcacactgctcttgtgactcccgcgacaacacactccaggtcgacattaatggcttcaccacagggaggaggggcgatctggcgacaatacatggcatgaaccgcccctttctcttgctgatggctacacctttagagcgagcacagcatttacagagctctagacataggagagctctagataccaattactgtttttcgtctaccgaaaagaattgctgcgttcggcagctctatatagatttcagaaaagacttgggttggaaatggattcacgaacccaagggctaccacgccaacttctgcctcgggccctgtccgtacatttggtctctcgatacacagtactctaaggtgctcgccctatacaatcagcacaatcccggagccagcgcggctccatgctgcgtgccacaggctctggagcccctgcccattgtctactacgtgggacgaaagccaaaggtggaacagctgagcaatatgattgtgaggtcttgtaagtgctct

SEQ ID NO: 568 - DNA, 1170 bp, Artificial Sequence
  Description of Artificial Sequence: Synthetic Transcript Sequence
atgccaccctccggtctgaggctgcttccgttgctgctgccactgctctggctcctggtgcttacccccggacggcccgccgctggactgtcaacctgtaagactattgacatggagttggtgaagagaaaaagaattgaagctatacgaggacaaatcttgtcgaaattaagactggcctccccgccttctcagggagaagtccctcctggacctctcccagaggccgtgctggccctgtacaactctactagagatcgcgtggctggggagtctgctgagcctgaacctgagcctgaagctgattattacgctaaggaggtcactagggtgctcatggtcgaaacccacaatgaaatctacgacaagttcaagcagtccacccacagtatctatatgttcttcaacacatccgagttgcgcgaggccgtgccagagcctgtcttgctgtcgcgggcagaattgcggctgctcagactaaagttaaaagttgagcagcatgtggaactgtaccaaaagtactccaacaactcatggcgctacctctccaatcgcctgcttgccccctcagattcgcctgaatggctatcttttgacgtaaccggcgtggtgagacagtggctgagtagaggcggagagattgaagggttccgcctttccgcccactgttcctgcgactcacgcgataatactttacaggtggatatcaacgggttcaccaccgggagacggggggatctggcgaccatccatggcatgaatcgtccctttttgcttctgatggccacccctctggagcgggcccaacatctgcagtcctctagacacaggagagcacttgataccaactattgcttctcctccaccgagaagaattgttgcgtcagacagctgtatatcgacttccgtaaagatctagggtggaagtggattcatgagcctaagggctaccacgccaatttctgtttaggcccttgtccctatatctggtcactcgacacacagtatagtaaagttttggcactgtacaatcaacacaatccaggtgcctccgcagcaccctgctgcgtacctcaggccctggagcccctgcccatcgtatactatgtgggtaggaagcctaaagtggagcagctgagcaacatgattgtgagatcttgcaagtgcagc

SEQ ID NO: 569 - DNA, 1170 bp, Artificial Sequence
  Description of Artificial Sequence: Synthetic Transcript Sequence
atgccgccttctggcctaaggttgctgccgctcctgctgccactgctgtggttgttggtcctgacacctggccgtcctgcagcgggcctgtcaacatgcaaaaccattgacatggagctcgtgaaacgcaaacgcattgaggcgatcaggggccagatcttgagtaagctcaggctggccagccctccaagccagggagaagtgcccccagggccgctgcccgaagctgtgttggccctctacaactctactagagatcgagtggccggcgaatcggcagaaccagagccggaacccgaggccgattattacgcaaaggaagtcactagggtcctgatggttgagactcacaacgaaatatatgacaaattcaagcagagcactcacagtatctatatgttttttaatacttctgagctgcgcgaggcagtccctgagcccgtcttgttgtcccgagctgagctgagactcctaaggcttaaactgaaagtcgagcagcacgtcgagctctaccagaagtactcaaataacagctggcgctacctctccaaccgacttcttgcgccctccgattcgcctgaatggctgtcattcgacgttacgggtgtggtgcgccaatggctgagccgcggcggtgaaatcgagggctttaggctatctgcccactgctcttgtgattctcgtgacaatacactgcaggtggacataaacggattcactacaggacggagaggggacctcgcaaccatccacggtatgaataggcctttcctactgctgatggcgacccccctggagcgagctcagcacctccagtcgagccggcacaggagagcactcgacaccaattactgtttttcctctactgagaaaaactgctgtgtgcggcagctttacatcgatttcaggaaggacttaggttggaaatggatacacgaacctaagggctatcacgcaaacttctgtcttggcccatgtccatacatttggtccctggacacccagtattcaaaggttctggcactctataaccaacacaaccccggcgccagcgcagcaccttgctgtgttccacaggctctcgagccactgccaatcgtgtactacgtgggtaggaaacccaaagttgagcagctttccaacatgatcgttcgcagctgcaaatgttcc

SEQ ID NO: 570 - DNA, 1170 bp, Artificial Sequence
  Description of Artificial Sequence: Synthetic Transcript Sequence
atgccgccgtcgggactgcgcctgctcccacttctcttgccgctcctgtggctcctggtccttaccccaggccgcccggccgcaggtttgagcacgtgcaagactattgacatggaactggtgaagcgcaagagaatcgaggctatacgcggccaaatcttgagcaaactcagattggccagcccgccgtcccaaggcgaggtgccgccaggacctctgccggaagccgtcctggctttgtacaactcgacccgggatcgcgtcgcgggagagagcgctgagcctgaacctgaaccggaggcagactactacgcaaaggaagttactcgcgtcctgatggtcgagactcacaacgaaatctacgacaaattcaaacagtctacccattcgatctatatgtttttcaacaccagcgaactgcgcgaagcagttccggaacctgtgctcctgtcccgcgctgagctgcgccttctgagacttaagctgaaagtggaacaacatgtggagctctaccaaaagtactccaataactcttggcgctacctctccaatcggttgctggctccgtcggacagcccagaatggctgtcattcgacgtgactggcgttgtgcgccaatggttgtcacggggcggggagatcgaaggcttcaggctgtccgcacactgttcgtgcgactccagggacaacactctgcaggtggacatcaacggcttcacgactggacgccgcggtgatctggctactattcacggaatgaatcgcccgttcctcctgcttatggcaaccccactcgagcgcgcccagcacctgcagtcatcccgccaccggcgcgcgctggataccaactattgcttttcatccaccgagaagaattgctgcgtgcggcagctttacatcgacttccggaaggatctcggctggaagtggatccatgaaccgaagggatatcatgccaacttctgcctgggcccttgtccgtacatctggtcccttgatacccaatactcaaaagtgctggccttgtacaaccaacacaatccaggagccagcgccgccccgtgctgcgtaccgcaggcactggaacccctgcctatcgtgtactacgtgggacggaagccgaaggtggagcagctgtcgaacatgatcgtcagaagctgtaagtgctcc

SEQ ID NO: 571 - DNA, 1170 bp, Artificial Sequence
  Description of Artificial Sequence: Synthetic Transcript Sequence
atgcctccgtccggtttgcgtctgttgcccctgctacttcctctcctctggctgttagtcctgacccctgggaggcctgctgccgggctcagtacctgcaagacgatagatatggaattggtaaaacgcaagcgaatcgaggctattaggggtcagatcctctccaagttacgtctcgcatcacctcctagccaaggtgaggtgcctcctggcccattacccgaagctgtgctggcactctacaactctacgcgcgacagagttgccggtgaaagcgccgaaccagagccggagcccgaagccgactactatgcaaaagaggtgacacgcgttctcatggtcgagactcataacgaaatttacgataagtttaaacagtccacgcactcgatctatatgtttttcaatacctctgaacttagagaagctgttcctgaacccgtacttctctcgagggccgagctccgactcttgagacttaagcttaaggttgaacaacatgtcgagctctatcagaaatatagtaataattcctggcgctatctttctaataggctcttggcaccctcggatagccctgagtggctcagcttcgatgtgactggtgtcgttcgacagtggttgtctcggggaggagaaatcgaggggttccgtttgtcggcgcattgtagttgtgactcgcgagacaacactcttcaggtcgatatcaacggtttcacgacaggtcgtcggggtgatttagcgaccatacacggtatgaaccgtccctttttgctgctaatggcaacaccgttggaaagggcccagcacctgcagtcatctcgtcataggcgagccctagacactaattattgttttagctccacagagaagaattgctgcgtgaggcagttgtatatcgactttcggaaagatttaggttggaaatggatccatgagccaaaaggataccacgcaaacttctgcctcggtccatgcccgtatatatggagtcttgatacccagtacagcaaagtcttggcgttgtacaaccagcataaccctggcgcctccgcagctccatgttgtgttcctcaggccttggagccactgcccatcgtctattacgtcggtcgtaagccaaaggttgaacagctaagcaatatgatcgttcgctcttgcaagtgtagc

SEQ ID NO: 572 - DNA, 1170 bp, Artificial Sequence
  Description of Artificial Sequence: Synthetic Transcript Sequence
atgcctcctagtggattgcggctcttgcctcttttactccctctcttatggctgctggttctgacacccggacgccccgcagctggcttgtctacctgtaagactatcgatatggagctcgtgaaacgtaaacggattgaggccattaggggccaaattctgagtaaactgcgcctggcaagtccccctagccaaggtgaggtaccgcctggacctctgccagaggccgtcctggccttgtataattccacaagagaccgcgtggctggggagtccgctgaacctgagccagaacccgaggcggattattacgctaaggaggtgactagagtcctgatggttgaaacacacaacgagatctatgacaaatttaagcagtctacacacagcatatacatgttcttcaacacatcggagctccgggaagcagtgcccgaaccggtgctcttatcgagagcagagcttagactgcttaggttaaaactgaaagtggaacagcatgtagaactataccagaagtattcaaacaatagctggaggtaccttagtaaccggctccttgcacccagcgactccccagaatggctgagttttgacgtgacgggagtggttagacagtggctgtcacggggaggcgaaatcgaaggttttcggcttagcgcccactgctcctgcgacagccgcgacaacactctccaggttgacataaacggctttacaaccgggaggcggggagatctcgccaccatccatggcatgaaccggccatttctgttgttgatggcgacacctttagagcgggcccaacacctgcaatcctctcgacatagacgagcgcttgacacaaactactgtttttctagcacagaaaagaactgttgtgtgcgacagctgtacatcgacttcaggaaggaccttggctggaaatggattcatgaaccaaaaggatatcacgcaaacttctgtctaggtccctgcccctatatatggagccttgatacccagtacagcaaggtgctcgcactctacaatcaacataaccccggtgcttccgcagccccgtgctgcgtgccccaggctctggaacccctccctatcgtgtactatgtggggcggaagcccaaggttgagcagctgtcaaatatgatcgtcaggagttgtaagtgtagt

SEQ ID NO: 573 - DNA, 1170 bp, Artificial Sequence
  Description of Artificial Sequence: Synthetic Transcript Sequence
atgcctccatcgggtctgaggctgctaccacttctgttgcccctgttgtggttactggttcttaccccagggaggcccgctgcgggtttgtccacttgcaagaccatagacatggagcttgtgaaaagaaagcgcatcgaagccattagaggacagatcctgagtaaactccggctggcgtcacctccatctcaaggcgaggttccaccaggccccctaccagaagcggttttggctctttataatagcacgcgtgaccgagttgccggtgagtccgctgagcctgagccagaacccgaggctgactattacgcgaaggaagtgaccagggtcctgatggtggaaacccataacgaaatatacgacaaattcaagcagtcaacacattccatttacatgttttttaatacatccgaactccgggaagcagtccctgaacctgtgttattgagccgggcggagctgcgcttgttgcggctgaagctcaaggtagagcagcatgtcgagctgtatcagaagtattccaacaatagttggagatacttatcaaacagattgttggcaccgtcagacagccctgagtggctttccttcgacgttacgggcgtggttcggcagtggctgtcccgggggggagaaatcgaaggttttcgtctgagcgcccattgtagctgtgattccagggacaacaccttacaggtggacatcaacgggttcacaaccggtagaagaggcgacctcgccacgatccacgggatgaataggccatttctgttgttaatggcaactcccctcgagcgggctcagcacctgcagtcatctagacaccgaagagcactggacaccaactactgcttttcttcaacggaaaagaattgttgcgtccgccagttgtatattgatttccggaaggacctagggtggaagtggattcatgagccaaagggataccatgcgaacttttgcctcggcccctgtccctacatatggagcctcgacactcagtattcaaaggtgctcgccctctacaaccaacataatccgggcgccagtgccgccccttgttgtgtgcctcaggccctggagccactgccaatcgtgtactatgttggacgcaagcccaaagtggaacagctaagcaacatgattgtgcggtcttgcaaatgtagt

SEQ ID NO: 574 - DNA, 1170 bp, Artificial Sequence
  Description of Artificial Sequence: Synthetic Transcript Sequence
atgccaccttcaggccttcggcttctgccactgcttctaccactgctgtggctgttagtgctgacacctggacggcccgctgctggccttagcacatgtaaaaccatcgatatggaactggtgaaaagaaagcggattgaggcaattcgggggcaaattctcagcaaattacgattggcttctccgccttcacagggtgaagtgccaccaggcccgctccccgaggctgttttggcgctttacaactcaacaagagatagagttgcaggggaatctgcagaaccagagcctgaacctgaggccgactattatgccaaggaagtgactcgggtcttaatggttgagactcacaacgagatatacgataagttcaagcagtccacccatagtatttatatgttttttaatacatccgagctccgagaggcggtccctgagcccgtgctgctctcaagggcagaattgagactgcttcgcctgaagctgaaggtggagcaacacgttgagctttaccaaaaatatagcaacaatagctggcgctacctctctaatcgccttctcgcaccgtcggactcaccagaatggctctcatttgacgtcaccggagtcgtgagacagtggctgagccgggggggtgagattgagggattccgcctcagcgctcattgcagctgtgatagccgggacaacactctccaggtggacatcaacgggttcaccacagggcggcggggcgatctcgctacgatccacggcatgaatcgtcccttcctgttactgatggctactcccctcgaacgtgcacagcacttgcagagttcacgacacagaagggctctggacacaaactactgtttttcctccactgaaaaaaactgttgtgtaagacagctgtacatagacttccgaaaggacctgggttggaagtggattcacgaacctaagggttatcacgctaacttctgtctaggtccctgtccctatatttggtccctcgacacccaatattcaaaggtgctggctctctataatcaacacaaccctggggcatctgcagctccatgctgtgtcccccaggccctagaaccgctgccaatcgtatactacgttggcaggaagccaaaggtggaacagctctccaacatgattgtgaggtcgtgcaaatgttca

SEQ ID NO: 575 - DNA, 1170 bp, Artificial Sequence
  Description of Artificial Sequence: Synthetic Transcript Sequence
atgccaccatcaggcctgagattgctgcctcttctgctgccactgctgtggttgttggtgcttactcctgggaggcctgccgctggacttagcacctgcaagaccatcgatatggaattggttaagcgcaagaggatcgaggctatcaggggacagattctgtcaaagttgaggctggccagtcccccatcccagggcgaggttccgcccggccccctgccagaggccgtcctcgccctgtataactccacccgggatagggttgccggcgagtcagccgagcccgaacccgagccagaagcagactattacgccaaggaggtcacaagggtgctcatggtggaaacccataacgagatctacgataaattcaagcagtctacccacagtatttacatgttcttcaacaccagtgaactgagggaggctgttcctgagcccgtccttttgagccgcgccgagcttaggctgctgagactgaaactgaaagtggaacagcatgtggagctgtaccagaaatactctaataacagttggagatacctgtccaatcgactgctggcccccagcgactcacccgagtggctttcatttgatgtaactggcgtggtgcgccaatggctttccaggggcggggaaattgaggggttcagacttagtgcacactgcagctgtgattcccgcgataacaccctgcaagtggatatcaatggctttaccactggccggaggggggatctggcgacaattcatgggatgaacagaccattcctcttgctcatggccacacctttggagcgggctcaacacctgcagtcatcaaggcaccggagagccctcgatactaactattgtttctccagcaccgaaaagaactgctgtgtccgacagctgtatatcgactttaggaaggatctgggttggaaatggattcacgagcctaaaggctatcatgctaacttttgtctcgggccttgcccctacatctggagcctcgatacccagtattccaaagttcttgcgctctacaaccagcacaatccgggtgcctccgctgctccctgctgcgtgcctcaggccctggaacccctgccaatcgtgtactatgtcgggaggaagcccaaagtcgaacagctctccaatatgatcgtgagatcatgtaaatgttct

SEQ ID NO: 576 - DNA, 1170 bp, Artificial Sequence
  Description of Artificial Sequence: Synthetic Transcript Sequence
atgccaccttcggggctgaggctgctgcccctgctgctcccactcctctggctgcttgtgttgacgccgggcagacctgcagcaggactgtcgacttgcaagaccatcgatatggagctggttaagaggaagcgcatcgaggccattcggggtcagatcctgagcaaactcaggctggcctctccaccatcacagggagaggtgccgccggggccgttgccggaggcagtgctggcactttacaactcgacccgcgatcgggtggcgggagagtcggcggaaccagaacccgaacctgaggcagactactacgcaaaggaggtcacgcgggtgctgatggtcgaaacccacaatgagatctacgacaagttcaagcaaagtacccactcgatctacatgttcttcaatacttcagaacttagagaagctgttcccgagcctgtgctgctgagccgggccgaactgcggctcctgcgcctgaaattgaaggtcgagcaacacgtggaactgtaccagaagtattccaataactcctggcggtacctgagcaacagactccttgcaccctccgatagcccggagtggctgagctttgacgtcaccggggtggtccggcaatggttgagccgagggggagagatcgaaggattcagattgtcagctcactgttcgtgcgactccagggacaatactctgcaggtggatatcaacggctttacgaccgggcggcgaggagatctggcgaccattcacggtatgaatcgccctttcctcctgttgatggcaaccccactggagcgcgcccagcatctccaatcatcacgccatcgcagagcgttggataccaattactgtttctcctcgactgaaaagaactgttgcgtccgccaactctacatagactttcgcaaagacctcggttggaagtggatccacgagcctaaaggctaccatgccaacttctgcctgggaccttgcccatacatttggtccttggatactcaatactcaaaagtgctggccctctacaatcagcataatccgggggcctcggcagcaccatgttgcgtccctcaggcactcgaacccctgccgatcgtttactacgtgggccggaagccgaaggtcgaacagctgagcaacatgatagtgcgctcctgcaagtgttcc

SEQ ID NO: 577 - DNA, 1170 bp, Artificial Sequence
  Description of Artificial Sequence: Synthetic Transcript Sequence
atgccccctagcggcttgcgcctgttacctttgctgttacccttattgtggttgctggttcttacccctggtcgaccagccgctgggctttcaacttgtaaaacaattgatatggaattggtcaagagaaagcgtatcgaggctattaggggacaaattttgtcaaagctcaggcttgcttcacctccgtcccagggtgaggtccctcctggaccgttgcctgaagccgttctcgctctctataactccactcgagacagggttgccggagaatcagctgaacctgaaccagaaccggaagccgattattatgctaaggaagtgacccgcgtactcatggtggagacgcataatgagatctacgataagttcaaacagtcgactcacagcatatatatgttctttaacacctctgaactaagagaggccgttccagaaccggtcttgttaagtagagccgagttgcgtttgcttcgtttgaaacttaaagttgagcagcatgttgagctctatcaaaaatattctaataattcttggcgatatttgtctaaccgtctacttgctcctagcgattcacctgagtggctttcatttgacgttacgggcgtcgtgcgacagtggctttcaagaggaggcgaaatcgaaggttttagactttctgctcattgttcctgcgatagccgtgataacactcttcaggttgatattaatggctttacgactggccggcgaggagacttagctactattcatggaatgaaccgaccattcctgctccttatggcgactcccctggagagagctcaacatcttcagtcttccagacatcgacgtgcattggacactaattattgtttctcgagtaccgaaaaaaattgttgtgtcagacagttgtacatcgatttcagaaaggacttaggatggaagtggattcatgagcctaagggttatcatgcgaatttttgccttgggccttgtccttatatatggtcgctggatacccaatatagcaaagttttagctctatataatcagcataatccgggtgcctccgctgcgccatgttgtgtccctcaagctcttgaacctctcccaattgtatattacgttggtcgtaagcccaaggttgaacaattatctaacatgattgtaaggtcatgcaagtgctcg

SEQ ID NO: 578 - DNA, 1170 bp, Artificial Sequence
  Description of Artificial Sequence: Synthetic Transcript Sequence
atgccgccctcaggcctgcggctgctgccgctcctcctcccgctgctgtggctcctggtgctcactcctggccgtcccgccgcaggactgagcacttgcaagaccatcgacatggaactcgtgaagcgcaagcggatcgaagccatcaggggccaaatcctgagcaagctccgcctggcgtcgccaccgtcacagggtgaagtgccgccgggacctctgccagaggcggtgctggccctttacaactccactagagacagagtggccggggagtcggccgagcctgagcccgagccagaagcggattactatgcgaaggaggtgactagagtgctgatggtggagactcacaatgaaatctacgacaaattcaagcaatccacccattcaatctatatgttcttcaacacctctgaactgagggaagcagtgccggaaccagtgctgctctcccgagcagagctgcgccttctcaggctcaagctgaaagtggaacagcacgtggagctgtatcagaaatactcgaacaattcctggagatacctgtcgaatcggctcctcgcaccgtcggactccccggagtggctctcattcgacgtgactggagtagtccgccagtggctgtccagaggtggagaaatcgaaggcttcaggctgtcagcacattgctcgtgcgattcgcgcgacaacactttgcaagtggacatcaacggcttcaccaccggacggcgcggcgaccttgccaccatccacggaatgaaccggccgttcctcctgctgatggccactccgctcgaacgggcgcagcacttgcagagctcccgccatcgccgcgccctggataccaattactgttttagcagcaccgaaaagaactgctgcgtccggcaactgtacatcgacttccgcaaagacctgggttggaagtggatccacgaaccgaaaggataccacgccaatttctgtctcggaccctgcccatacatctggtccctcgacacgcagtactcgaaagtgttggcgctttacaatcagcataaccctggagcaagcgcagccccgtgctgcgtccctcaggccttggaaccgctcccaattgtgtactacgtcggcagaaagccaaaggtggagcagctgagcaacatgattgtgagatcatgtaaatgctcc

SEQ ID NO: 579 - DNA, 1170 bp, Artificial Sequence
  Description of Artificial Sequence: Synthetic Transcript Sequence
atgccgcctagcgggcttagactgctgcctcttctgcttcctcttctgtggctgctggttctgacgcctgggaggccagccgctggactctccacctgtaagaccattgatatggagctggtcaagcggaagcggatcgaggcgattagggggcaaattctttcgaagctgcgtctcgcctcgccaccctcccagggagaggtgccaccgggtcctctccctgaggcagttctggcactttacaacagcacccgagacagggtggcgggcgaatcggcggagcccgagccggagccagaagccgactactacgccaaagaagtgactcgcgtgcttatggtggaaacgcacaacgaaatctacgacaaattcaaacaatcgacccactcgatttacatgttctttaacaccagtgaattgagagaagccgtgcctgagcccgtgcttttgagtagagctgaacttcggctgctgagacttaagctgaaggtggagcaacatgtggaactttaccagaagtacagcaacaattcgtggaggtacctttccaataggttgcttgcaccatccgattcgcctgaatggctcagctttgatgtgaccggtgtggtacggcaatggcttagccgaggaggcgaaatcgagggattccggctgagcgctcattgctcatgcgacagcagggataacactttgcaagtggacataaacggcttcacgaccggacgaagaggtgatctggcaactatccacggtatgaatcggccgtttctgcttctgatggcaaccccactggagagagctcagcacctgcagagctctcgccatagaagggcccttgatactaactactgctttagcagcaccgaaaagaattgctgtgtgcgccaactctacatagactttcgcaaagatctcgggtggaaatggatacacgagccgaaaggctaccatgcgaatttctgccttggaccatgtccctacatttggtcacttgacactcagtactccaaggtcctcgcactctacaaccaacataatcctggagcgtccgcagccccctgctgtgttccacaggcacttgaaccacttccaatagtgtattatgtcgggcggaagcctaaggtggaacaactctccaatatgatcgtcagatcgtgtaagtgtagc

SEQ ID NO: 580 - DNA, 1170 bp, Artificial Sequence
  Description of Artificial Sequence: Synthetic Transcript Sequence
atgccgccatcgggacttagactgttgcctctgctgctgcctttgctgtggctcttggttcttactcctggacgcccagccgcaggtctgtccacctgtaagacgattgatatggaactggttaagcgcaagcgcattgaagcaatcagagggcagatattgtcgaaactgcggcttgcttcccctccgtcacagggtgaagtgcctcctggtcctctgccggaggcagtgcttgcactctacaactccaccagagatagagtggcaggagagtccgcagaaccagagcccgagcctgaagcagactactacgctaaggaggtgacgagagtgcttatggtggaaacgcataacgagatttacgataagtttaagcaaagcactcacagcatctacatgttctttaacacctcagaactgcgtgaagcagtgccagaacctgtgcttctgtcaagggcagaactcaggctgctgcgactgaagctcaaggttgagcaacacgtggagctgtaccaaaagtacagcaataactcatggaggtacctgtcgaaccggcttctggccccctcggatagccctgagtggctgtcgttcgacgtaactggagtggtgagacagtggctgagtagaggtggggaaatcgaagggtttcgcttgtccgcccattgcagctgtgatagcagggataacaccctgcaagtggacattaacgggtttactactggtcgacggggagatctggccaccattcatggaatgaatcgtcctttccttctgttgatggcaactccgttggagcgcgcccaacatctccagtcgtcaagacataggagagcactggacaccaactactgtttttcatcaaccgaaaagaattgttgtgtgcgccaactctatattgacttccgcaaagatcttgggtggaaatggattcacgaaccaaaaggataccatgctaacttttgccttggaccatgcccttacatctggtcccttgatacccagtatagtaaggtcctcgctttgtacaaccagcacaatcctggcgcttcggcggcaccatgctgtgtgcctcaagcactggagccccttcccattgtctactacgtcggtcgaaagccgaaagtggagcagctcagcaatatgattgtgcggtcctgtaagtgttcc

SEQ ID NO: 581 - DNA, 1170 bp, Artificial Sequence
  Description of Artificial Sequence: Synthetic Transcript Sequence
atgcccccctccggcctgcgactcctgcccctattgttgcctctgctgtggcttctcgtcctgacccccggtcggccggccgcgggcctctcgacctgcaagaccatcgacatggaacttgtcaagaggaaacgcatcgaggcgatcagaggacagatcttatccaaactcaggctcgcctcgcctccctctcagggtgaggtcccgccgggacctttgcccgaggccgtcctcgcgctttacaactctacaagggaccgtgtcgccggcgagtccgctgagccggaacctgagcccgaggctgactattatgctaaggaagtgacccgtgtgttgatggtggaaacccacaacgagatttacgacaagttcaagcagtcgacccacagtatctatatgttcttcaacacctcggagctgcgggaggcggtcccggagccggtcctattgtctcgtgctgagctgcgactgcttaggctcaagctgaaggtcgagcaacacgtcgagctgtaccaaaagtactccaacaattcgtggaggtatctgagtaaccgcctcctagcgccgagcgactcgcctgaatggctgtcgttcgacgtcaccggtgtcgtccgtcagtggctctcccgcgggggtgagatcgaaggtttccgtttgtctgctcactgcagttgcgactctcgggacaacacgctgcaggtcgatattaacggattcacgaccgggaggcgcggcgacctggcaactatccacggtatgaaccgccctttcctcctgctgatggccacaccgctcgaacgtgctcagcacttgcagtcctcccgtcataggcgggcgcttgatacgaactattgcttctcgtctaccgagaagaactgctgtgtgcgccagctctacatcgatttccgtaaagatctgggctggaagtggatccatgagcccaagggctatcacgcgaacttctgcctgggaccctgcccgtacatatggtccctcgacacccaatactcgaaggttctggccctttacaaccaacacaaccccggtgccagcgcggctccgtgttgcgtgccccaagcgttggagccactgccgatcgtctactatgtgggtcgtaagccgaaggtcgagcagttgtctaacatgatcgttcgctcgtgcaagtgctcc

SEQ ID NO: 582 - DNA, 1170 bp, Artificial Sequence
  Description of Artificial Sequence: Synthetic Transcript Sequence
atgccccctagcggactccgcctcctgcctttgctgctcccacttctgtggcttctcgtactgactccgggacgaccagccgccggactgtcgacttgcaagaccatcgacatggaactggtgaagagaaagcgcattgaggcaatccgcggtcaaatcctgagcaagttgaggctcgcttcacctccttcccagggggaggtgcccccaggaccacttccagaggcggttctggctttgtacaactcgactcgtgaccgcgtggcaggagaatccgcagaacctgaaccggaaccggaggcggattactatgccaaggaggtcactagggtgctgatggtggagacgcataacgaaatctacgacaagttcaagcaatcgactcactccatctacatgttctttaacacttccgagcttcgggaggcggtcccggaaccagtcttgctgtcccgcgctgaactgaggctgctccgtctgaagctgaaggtcgaacagcacgtggaactgtaccaaaagtactcaaataacagttggcgctacttgtcgaatcggctgctggcgcctagcgattcgcctgagtggctctcgttcgacgttaccggagtcgtacggcagtggctttcgaggggcggcgaaatcgagggattccggctgtcggcacactgttcctgcgattcccgggataacaccttgcaggtggacattaatggcttcaccacgggacgccggggagatttggcgacgatccatggaatgaatagaccgtttctgctgttgatggcaacccctctcgagcgggcccagcatctgcaatcgagcaggcaccgccgggccctggacacgaactactgcttttcctccaccgaaaagaactgctgcgtccggcagctctacatcgatttccgcaaggacctcggatggaaatggatacatgagccaaagggctaccacgccaacttctgcctgggaccttgcccgtacatttggtcactcgacacccagtattcaaaagtgctggcactgtacaaccagcacaatcccggtgccagcgcggcgccatgctgtgtgccacaggccctggaaccgttgccgatcgtctactacgtggggcgaaaaccgaaagtggaacaactctccaacatgatcgtgcggagctgcaaatgttca

SEQ ID NO: 583 - DNA, 1170 bp, Artificial Sequence
  Description of Artificial Sequence: Synthetic Transcript Sequence
atgccaccgtccggcttgagactgcttcccctgctgttgccgttgctgtggctgttggttctgaccccgggtagaccggctgcaggtctcagtacctgcaagactattgatatggagctcgtgaagcgcaagagaatcgaggctattagaggacagattctcagtaagctgcgccttgcctctccacccagtcagggcgaggtgccgcccggaccgctccctgaagcagtgcttgctctgtataattcaacgagagatcgcgtcgccggcgagtctgcggaacctgaaccggagcctgaggcggactactatgcgaaagaggtaacaagggttctgatggtagagacgcacaacgagatctacgacaaattcaagcagagtacacattccatttacatgtttttcaacacaagcgaactccgcgaggctgtgcctgaacctgtgctgctttcccgcgctgagctgaggttgctcaggttgaaactgaaggtagagcagcacgtggaactgtaccagaagtacagtaacaacagttggcgctatctgtccaataggctgctggctccttccgatagccccgaatggctgagtttcgatgtgaccggagttgtaaggcaatggctgtcaagaggaggagagattgaaggttttcgcctcagcgcccactgctcttgtgatagtagggataatacgcttcaagtagatattaatggctttaccactggtagaagaggtgacttggcaaccattcatggcatgaatagaccgttcctgctgttgatggccactcccctggaacgcgcacagcacctccaatcttccagacatagaagggctttggatactaactattgtttcagttccacggagaaaaactgttgtgttagacagttgtatatcgactttaggaaggaccttggctggaagtggattcatgaacccaagggctaccacgccaatttctgtctgggtccatgcccttatatctggtcccttgacacccagtattcaaaggtgttggctctgtataaccagcacaaccctggagcgtctgctgctccgtgttgcgttccccaagctctggagcctctccccattgtgtactatgtcggaaggaagccaaaagtggagcagctgtctaacatgatcgtccgctcctgcaagtgtagc

SEQ ID NO: 584 - DNA, 1170 bp, Artificial Sequence
  Description of Artificial Sequence: Synthetic Transcript Sequence
atgcccccttcgggtctgcgcctgctgccacttctcctgcctcttttgtggctgttggtgctcaccccaggcagaccagcggcgggcctttcgacctgtaagacgatagatatggaactggtcaagcggaaacgaatagaggccatcagggggcagattctctcaaagctgcgtctggcaagcccgccttcgcaaggtgaggtccctcctggacctctccctgaggccgtgctggcactttacaacagcacgcgcgacagagtggcaggggaatccgcagaacctgagcccgagcctgaggccgattactatgcaaaggaagtgacccgcgtgctcatggtggagactcataacgaaatctacgataagtttaagcaatccacccattccatttacatgtttttcaacacctccgagttgagagaggcagtgcctgaaccggtgctgctcagcagagcagagcttcgactccttcgtctgaaacttaaggttgagcagcatgttgaactctaccagaagtattccaacaattcatggcggtacctgtcgaatcggctcttggcgccttctgacagtcctgaatggttgtcgttcgatgtgacgggagtcgtgaggcagtggctctcacgaggcggtgagattgagggattccgcctgagcgcacattgctcgtgcgattcacgagataacaccctccaggtggatatcaatggttttaccaccggtagacggggggacctcgcaaccattcacggaatgaaccggccattcctgcttctgatggcaaccccgctggagcgagcacaacatctccaatcttcgagacacagaagagcccttgacacgaactactgcttttcctcgactgagaaaaactgttgcgtgcgtcaactctacattgattttaggaaggacctgggatggaagtggattcacgaacccaagggttaccatgctaatttctgtctcggaccatgtccttacatatggtccctggacacccagtactcgaaggtcctcgcactgtacaatcaacataatccaggagcatcagcagcgccatgttgcgtgccccaagccctcgagccgctgcctattgtgtactacgtcggcagaaaacctaaggtggaacaactgtcaaacatgattgtgagatcctgtaagtgctcg

SEQ ID NO: 585 - DNA, 1170 bp, Artificial Sequence
  Description of Artificial Sequence: Synthetic Transcript Sequence
atgccaccctctggattgaggctcctgcctcttctcctccccctactgtggctcctggtactgacccccggccgacctgccgcaggcctctccacatgcaagaccattgacatggagttggtgaaaagaaaacgaatcgaggcgattcgcggccagatcctgtcaaaactgcgactggcctcacctccctctcagggagaagtgccaccaggacctctgcccgaggccgtgctggctttgtataactctactcgagacagggttgcgggagagtccgctgaacccgagccagagccggaggccgattactatgctaaagaggttaccagagtcctgatggttgagactcacaacgagatctacgataagttcaaacagagtacccactctatatatatgttttttaataccagcgagctgcgagaggccgtaccggaacccgtcctattgagtcgcgcagagttgcggctcctgagattaaaacttaaagttgaacagcatgtcgagttgtaccagaaatactctaataatagctggcgatacctctctaataggttgctggcccccagtgattctcccgagtggttgagtttcgatgtaacgggagtggtccgtcaatggctctcacgtggaggtgagattgagggattccggctgtctgctcactgcagctgtgattcaagagataacaccttacaagtggacatcaatgggtttacaacgggccgtcgcggggacctagcaacaattcacggcatgaacagaccattccttctcctcatggctactccactggagcgagcacagcacctgcagtcttctcgccacaggcgggcccttgatacgaactattgtttttcgtccacagagaaaaattgctgtgtgcgccagctgtacatcgattttaggaaagatttgggatggaaatggatccacgaacccaaggggtaccacgccaacttttgcctcggaccctgcccctacatttggagccttgacactcaatactcgaaggtactcgctttatacaatcagcacaaccctggggcttctgctgccccctgctgcgtgccgcaggctctggagccactgcccattgtgtattacgtgggcagaaaaccgaaagtggaacagttgtctaatatgatcgtgcgaagctgcaaatgcagc

SEQ ID NO: 586 - DNA, 1170 bp, Artificial Sequence; identical to SEQ ID NO: 541
  Description of Artificial Sequence: Synthetic Transcript Sequence

SEQ ID NO: 587 - DNA, 1170 bp, Artificial Sequence
  Description of Artificial Sequence: Synthetic Transcript Sequence
atgccgccatcggggttgcgccttctcccactccttctgccgcttctgtggctccttgtgctgactccgggaaggcctgctgcgggactctcgacctgcaagaccatcgacatggagttggttaaaaggaagcgaatcgaagctatccgcggacagatcctctcgaagctcaggcttgcgtcgccgcctagtcaaggagaagtgccccccggaccgctgcctgaagctgtgctcgctttgtacaactcaacccgggaccgtgtggccggggaatcggcagaaccggaacccgaaccggaagccgactattacgcgaaggaagtgacgcgggtcctgatggtcgagactcataatgagatctatgataagttcaaacagtcgacccattcaatctacatgttcttcaacacttcagagctgcgcgaagccgtgccggaacctgttttgctctccagggccgagcttcggctgcttagactgaagctcaaagtcgaacaacacgtggagctttaccagaagtatagcaacaactcatggcggtacctgagcaataggctcctggcaccatcagattcccccgagtggctctcgtttgatgtcactggagtcgtgagacaatggttgtcaagaggaggagagatcgagggcttccgtctgagcgcgcattgctcctgtgacagccgcgacaatacccttcaggtggacatcaacgggtttaccacgggccggcgcggcgacctggccactattcacggaatgaacaggccgttcctgctgctgatggccacgccactggagagggctcagcacctccaatcctcccgccatagacgggccctggataccaattactgcttcagcagcaccgagaaaaactgttgcgtgcggcagctctacatagatttcagaaaggatctcggctggaagtggatccacgagcctaagggctaccacgcaaacttttgcctgggaccgtgcccgtacatttggtcgttggacactcagtactccaaagtgctggcgctttacaaccagcacaacccgggtgcatccgccgcgccatgttgcgtgcctcaagccttggagccacttccgattgtatactacgtgggtcgtaaacccaaggtcgaacagttgtcgaatatgatcgttcgaagctgcaagtgtagc

SEQ ID NO: 588 - DNA, 1170 bp, Artificial Sequence
  Description of Artificial Sequence: Synthetic Transcript Sequence
atgcccccctccggcctccgattgttacctctgttgctcccactgctttggctactagtgttgacgcctgggcgacccgctgcaggactgtccacttgcaagaccattgacatggagcttgtgaaaagaaaaagaatagaagctattagaggccagatcttgtccaaactcaggctggctagcccacctagtcagggcgaggttccacctgggcctctgcctgaggcagtgcttgccttgtacaacagcacccgtgaccgggtggcaggggaatctgccgagcccgagcccgagcctgaagctgactactatgctaaggaagtgacccgagtgctgatggtggagacacacaacgagatttacgacaaatttaagcagtcgactcactccatctatatgttcttcaatacctccgagcttagggaagccgtccccgaaccagtcttgctgtcacgcgctgagctgcggctgctaaggttaaagctgaaagtcgagcagcacgttgaactataccagaaatattccaacaactcgtggcggtacctttccaaccgcttactcgccccttctgattcacccgagtggctgagttttgacgtcactggagtagttcggcagtggttaagtcgggggggcgaaatcgagggcttcaggctgagtgcacactgtagttgtgacagcagagacaacactttacaggtcgatattaacggatttacaaccgggcgacgcggcgacctggccactatccacgggatgaataggccgttcctactgttgatggccaccccgctggaacgagcccagcacctccaatcctctagacatagacgcgccctggataccaattactgtttctcctcaacagagaagaattgctgcgtgcgtcagctctacatagattttcggaaggacctgggttggaagtggatccatgaaccgaagggataccatgctaacttctgtcttggcccatgcccttacatttggtcactggatacccagtacagcaaggtgctagcgttgtataatcagcataatcccggcgcgtctgccgcaccttgttgcgtacctcaagcactggaaccattgcctattgtctattacgtaggcagaaagccaaaggtagaacagctgtccaacatgatcgttcgttcttgtaagtgctcc

SEQ ID NO: 589 - DNA, 1170 bp, Artificial Sequence
  Description of Artificial Sequence: Synthetic Transcript Sequence
atgccccctagtggacttagactcctcccactcctcctgccacttctgtggcttctggttctgactcccggaaggcctgctgccggcctcagcacatgtaaaactatagacatggagctagtgaaaagaaaaaggatagaggcaatccggggacaaatcttgagtaaactgaggttagcttcgcctccgagccagggcgaagtccctccaggccctctgcccgaagcagtgttagccctgtataacagcaccagggatcgggtggcaggcgaaagtgccgagccagaaccagagcctgaagcagattactacgctaaggaagtgacacgggttcttatggtcgaaactcacaatgaaatctatgataagttcaaacaatcgacacactctatttatatgttttttaatacaagcgagctaagggaggccgtccccgagccggttctgctctccagagccgagctgcgcctcctcaggttgaagctgaaagtggagcagcacgtcgagctgtatcagaaatacagcaacaactcttggaggtaccttagcaacagattgttggctccaagcgactctcctgaatggcttagttttgatgttacaggggtggtgagacagtggctgagccgcggaggtgagatcgagggctttcgactgtccgcccattgcagttgtgattcccgcgacaatacacttcaggtggacataaacggctttacgactggaaggagaggagaccttgcgactatccatggaatgaatcgccccttcctgctgcttatggccacccctttggagagggcgcagcacttgcagtcgtcaaggcaccgacgagcgctggatacaaattattgcttttcttcaaccgagaagaactgctgcgtgaggcaactatacatcgattttaggaaggatttgggctggaagtggatacatgagcccaaaggctatcatgcaaacttctgcctggggccatgcccctatatctggtctcttgatactcagtatagcaaagtgctggctctgtataaccagcacaatcccggtgccagcgctgccccttgctgcgtgccacaggctctggagccattgcccatcgtgtactatgtcgggagaaagccaaaggtggaacaactgagcaacatgatagtgagatcgtgcaaatgtagt

SEQ ID NO: 590 - DNA, 1170 bp, Artificial Sequence
  Description of Artificial Sequence: Synthetic Transcript Sequence
atgcctccatcaggattacgacttttaccattattacttcctttattatggcttttagtattaacaccaggacgtccagcagctggattatcaacttgtaaaacaatagatatggaattagttaaaagaaaaagaattgaagctattagaggacaaattttatcaaaattaagacttgcttctccaccatcacaaggagaagttcctccaggaccacttccagaagctgtacttgctctttataattcaacacgtgatagagtcgcaggagaatcagcagaaccagaaccagaacctgaagctgattattatgcaaaagaagtaactagagttttgatggttgaaacacacaatgaaatctatgataaatttaaacaaagtacacattcaatttatatgttctttaatacatcagaattacgagaagcagttcctgagccagttttactttcaagagctgaattaagattattaagattaaaactaaaagtagaacaacatgttgaattatatcagaaatatagtaataattcatggagatatttatcaaatagattattggctccttctgactctccagaatggttgagttttgatgtaacaggtgttgtaagacaatggttaagtagaggtggtgaaattgaagggttcaggttatctgcacattgttcttgcgattctagagataatacattgcaagtcgatattaatggatttactacaggtcgacgtggtgatttagctacaatacatggaatgaatagaccttttcttcttcttatggctactccacttgaaagagctcaacacttacaatctagtagacatagacgtgcactagatactaattactgtttttcatctacagaaaaaaattgttgtgttcgacaactttacattgattttagaaaagatttgggttggaaatggattcatgaaccaaaaggatatcatgcaaatttttgtttgggaccatgtccttatatatggtcattagatacacaatattcaaaagttttagccttatataatcaacataatccaggagcttccgcagcaccttgttgtgttccacaagcattagaacctttgccaattgtatattatgttggaagaaagccaaaggttgagcaattatctaatatgattgtaagatcatgtaaatgttca

SEQ ID NO: 591 - DNA, 1170 bp, Artificial Sequence
  Description of Artificial Sequence: Synthetic Transcript Sequence
atgcccccatccgggctgcgactcctgcccttgctcctgcctttgttatggttgttagtgctgacgcccgggaggcccgcggcagggctctcgacctgtaagaccatagacatggagttagtcaagagaaagcgtattgaggctatccgggggcagattctgagcaagttgcgcctggcgtcccctcctagtcagggtgaggtgcctccaggccctttgcctgaggcagtgctggccctatacaacagcaccagagaccgcgttgccggggaatctgccgagccggagccggaacccgaagctgactactatgccaaggaggttacgagggtccttatggtggagacacataatgaaatttacgataaattcaagcagtctactcacagcatctatatgttttttaatacatcagaactgcgggaagcagtgcctgagcctgtgcttttgagtcgcgctgagctaaggctgttgcgcctgaaactcaaagtcgagcagcacgtcgagctgtaccagaagtacagcaataatagctggaggtacctgtctaacaggctgctcgccccctcggactccccggaatggctctcctttgatgtcacaggggtcgtacgacaatggctatctcgcggtggggaaatcgagggatttaggctctctgctcactgtagttgcgactctcgcgataatacgctacaagtcgacatcaacggtttcacgacaggccgcagaggggatctggctaccattcatggcatgaaccgaccttttcttctcctgatggccacccctctggagagggctcagcaccttcagtcgtccaggcacaggcgcgcccttgacaccaattactgcttttcctccactgagaaaaattgctgcgtgcggcaactgtacatcgattttcggaaagacctgggatggaagtggattcacgaacccaaaggctatcatgccaacttctgtctcggaccatgcccctacatttggagtctagacacgcagtactctaaagtacttgctctatacaaccagcacaaccccggtgcaagcgctgcgccctgctgtgtcccacaggctctggaaccattgcctatcgtgtactacgtgggtcggaaacctaaagtggaacaactgtccaatatgattgtcagaagctgtaaatgctca

SEQ ID NO: 592 - DNA, 1170 bp, Artificial Sequence
  Description of Artificial Sequence: Synthetic Transcript Sequence
atgccaccatctggattgcgtcttctccctctgctgcttccattgctctggcttctggtgttgacacccggaaggcccgccgctggtctctccacttgcaaaaccatcgatatggagctggttaagagaaagaggatagaggccatcagaggtcagatcttgagcaaattgcgtctcgcatcacctccttcccaaggtgaagtccctccaggccctctccctgaggcagtcctggctctttacaatagcacccgcgatagggtggccggagaaagtgcagagcccgaacccgaaccagaggctgattattatgctaaggaagtgacacgcgtccttatggtggaaacacataatgaaatatacgacaagtttaaacagagtacccacagcatctacatgttcttcaacacatccgaactgagagaggcagtacctgaaccagtgctcttgagtagggctgaactgaggctgctcagactgaagctgaaggtggagcagcacgtagaactctatcagaagtactcaaataattcttggagatacctcagtaatagactccttgcaccatccgattcaccagagtggttgtctttcgatgtcaccggtgtcgtcaggcagtggctctctcgtggtggagagatcgagggatttagactctccgcacactgctcatgcgattccagagacaatacccttcaggttgacattaacggcttcacaactggccgtcgcggcgacttggccactattcacggcatgaaccgtccttttctgttgctgatggcaaccccactggagcgtgcacagcacttgcagtcctctagacacagaagggcccttgatactaactactgtttcagttccaccgagaagaactgctgcgtgaggcagctctacattgacttccgcaaggacctgggttggaaatggattcatgaacccaaaggatatcatgctaatttctgtctgggtccatgcccctacatctggtccttggacacacaatatagcaaggtgctggcactttataaccagcacaatccaggcgcctcagccgccccatgctgtgtgcctcaggccctggagccactgcctattgtgtactatgtaggacgtaaacctaaggtcgagcagttgtctaacatgattgtgagatcatgcaagtgtagc

SEQ ID NO: 593 - DNA, 1170 bp, Artificial Sequence
  Description of Artificial Sequence: Synthetic Transcript Sequence
atgccaccatcaggcctccggctgcttccgctgctgctgccactcctgtggctgcttgtcctgacgccaggccggccagctgcggggttgtctacatgtaagaccattgacatggaactcgtgaaaagaaagcggattgaagccattaggggtcagatccttagcaagctgagactcgcttcccccccctcacaaggagaggttccccctgggcccctgcctgaagccgtgctggccttgtacaattccactagagacagggtggccggcgaaagtgccgagccggaaccagaacctgaagccgattactacgccaaggaggtgactagagtattgatggtggagacccacaatgaaatatatgacaagttcaagcagtctacacactcaatctacatgttcttcaacactagcgaactgagggaggccgtcccggaacccgtgttgctgtctcgagccgaactgcgcctcctgcggcttaaattgaaggtggagcaacatgtagagttgtaccagaagtattcaaataatagttggagatatctgtccaaccgtctgctagctcctagcgactctccggagtggctgtcattcgatgttaccggggtggtcaggcagtggctgtcccgaggaggcgaaatcgaagggtttaggctcagcgcacactgctcgtgtgactcaagggacaacactctgcaggtggacatcaatgggtttacaaccgggcgacggggggacctcgccacaatacacggcatgaataggcctttcctgttgctcatggcgacccccctggagcgcgcccaacatctgcaaagttcacggcatcgcagagcattagacaccaactactgtttttcttctacagagaaaaactgctgtgtacgccaactgtatatcgacttccgcaaggacctggggtggaagtggatccacgagcccaagggatatcacgccaatttctgtcttggcccttgtccatacatttggagcctggacactcagtattcgaaggtgctcgccctatacaaccagcacaaccccggggcctcggctgccccctgttgcgtcccacaggcgctcgagccactccctatcgtatactatgtaggacggaaacctaaggtggaacagttaagcaacatgattgttcgttcatgtaagtgtagc

SEQ ID NO: 594 - DNA, 1170 bp, Artificial Sequence
  Description of Artificial Sequence: Synthetic Transcript Sequence
atgcctcctagcggacttcggcttcttccgcttctgcttcccctcctttggctgcttgtgttgaccccaggacgcccagctgccgggctgtccacttgcaagaccattgatatggagttggtcaaaagaaagaggatagaagcaattagaggacagattcttagcaagttgaggttggcgtcccctccgtcccagggcgaggtgccacccggacctcttcccgaggcagtcctggcgttgtacaactcgacgagagatagagtggccggggaatccgccgaacccgaacctgaaccggaagcagattactacgccaaggaggtgaccagggtgctgatggtcgaaactcataacgagatttacgataagtttaaacagtcgactcattcaatttacatgttctttaacacctcggaactccgagaagctgttcctgaacctgtccttctttccagggcggaactccgcctgctgcgccttaagctgaaggtggaacaacatgtcgagctctaccagaaatactccaataactcgtggagatacctgagcaacaggctgctggcaccatcggactcgcctgagtggcttagcttcgatgtgactggagtggtgagacaatggctttcgagagggggagagattgaaggatttcgcctgagcgcacattgcagctgcgattcgagagacaatacgcttcaagtggacattaatggattcaccacgggtaggcgaggcgacttggcgactattcatggaatgaaccgcccctttctcctgctgatggcaactccactcgagcgagcacagcatcttcaatcgtcccggcacagaagggcactcgataccaactactgtttttcatccactgagaaaaactgttgtgtgcgccagctgtacattgatttcaggaaggacctcggttggaaatggattcacgagccaaagggttaccacgcaaacttttgtctcggaccctgcccttacatttggtcgctggatacccagtacagcaaggtgcttgcactttacaaccaacacaatccaggagcaagcgccgccccgtgttgtgtcccgcaagcgctggaaccactgccaatcgtgtactacgtgggacggaaacctaaagtggagcagctcagcaatatgatcgtgcggtcatgtaaatgctcc

SEQ ID NO: 595 - DNA, 1170 bp, Artificial Sequence
  Description of Artificial Sequence: Synthetic Transcript Sequence
atgccaccttcaggcctgcggctgcttcctttgctgcttcctcttctctggctccttgtgcttactccaggacggccagcagcaggcctgtccacctgcaaaaccattgatatggagcttgtgaagagaaaacgaattgaagcaataagaggacagatccttagcaagctgcggcttgcatcgccaccttcccagggtgaggtgcctccaggtccacttccagaagccgtcttggccttgtataacagcacccgtgatagagtggcaggggaatcggctgagccggaacccgaacctgaagcagactactacgcaaaggaggtgaccagagtgctcatggtcgaaacccacaacgaaatctacgataagttcaagcaatcaactcattcaatttacatgtttttcaacacttcggaacttagggaagcggtgcctgaaccagtcctgctctctcgggcggaactccgtctcctccgacttaagttgaaagttgagcagcacgtcgagctgtaccagaagtactccaacaactcgtggaggtacctctcgaaccgactgcttgctcctagcgactctccagagtggctttcgtttgatgtgactggagtcgtgcgacaatggctctcccggggaggggaaatagaaggctttagactgagcgctcactgttcgtgcgactcgcgcgataacactctgcaagtcgacataaacggttttaccaccggacgtcgcggtgatcttgcaaccattcatggaatgaaccgcccttttcttcttctcatggcgacccccctggagagagcacaacaccttcaatcgtccaggcataggagagcgctcgatacgaactactgcttcagtagcaccgagaagaactgttgcgttcggcagctttacatcgattttcgcaaggatctgggatggaagtggatccatgaaccgaaaggataccacgccaatttctgtctgggaccctgtccatacatttggagcctggatactcagtactccaaggtgcttgcactgtacaatcaacataatcctggagcctccgcagcaccatgttgcgtgccccaagcactcgagcccctccctattgtgtactacgtcggaagaaaacccaaggtggaacagctttccaacatgatagtgagatcctgcaagtgttcg

SEQ ID NO: 596 - DNA, 1170 bp, Artificial Sequence
  Description of Artificial Sequence: Synthetic Transcript Sequence
atgcccccctctggtcttaggctactgcctctgctacttcctctcctgtggttgctcgttctgactcccgggagacccgcagcggggctttccacatgcaagaccattgacatggagcttgtcaagcggaagcgcatcgaggcaatcaggggtcagatattgtcaaaactcagactggctagccctcctagccagggtgaggtccctcccggccccctgccagaagcggtgctggctctttataattctacccgagatagggttgccggggaatcagccgagcctgaaccagagcctgaagcagattactatgccaaagaggttacacgtgtactcatggtggaaactcacaacgaaatatatgacaagttcaaacagtctacacactccatttatatgtttttcaatacttctgaacttcgtgaggcagtgcctgaacccgtgctgctctccagagcggagctgcgtctgctgagactgaaattgaaggtggaacaacatgtcgagctgtatcagaagtacagcaacaacagttggagatacttgtccaatagactgctcgctccatccgacagccctgaatggctgtcttttgatgtcacaggagtggtgagacagtggctcagcagaggaggcgaaatcgaagggttccgtctttccgcccactgttcatgcgactctcgcgacaatacccttcaggtggacataaacgggttcactaccggaaggcggggcgatctcgcaaccattcacggcatgaacaggccgtttctcctcctgatggccacgcccctcgaaagagcacaacacctccaaagtagtagacacaggcgggcactcgatacgaactattgctttagctcaaccgagaagaactgttgtgtccggcagctttacatcgactttcggaaagacttagggtggaagtggattcacgaacccaagggctatcacgctaacttttgtcttggaccgtgtccctatatctggtctcttgacacgcagtacagcaaggttctcgcactgtacaaccagcacaaccccggcgcctctgctgctccatgctgcgttcctcaggcactcgagcctctgcctattgtctattacgttggtcgtaaacccaaggtcgagcagctctcaaatatgattgtgagatcctgtaagtgttcg

SEQ ID NO: 597 - DNA, 1170 bp, Artificial Sequence
  Description of Artificial Sequence: Synthetic Transcript Sequence
atgcccccatctggattaaggctgcttccactgttactcccacttttatggcttctcgtgctgacgccgggacgcccagctgctgggctctccacctgcaagactatcgacatggagctggtcaagaggaagcgcatcgaggccatccgagggcagatcctgagcaaactgagattagcttctccgccttcacaaggtgaggtgccccctgggccactcccagaagccgtgctcgcattatacaacagtacaagggatcgagtcgccggcgaatccgccgaacctgaacccgagccggaggccgattactatgcgaaagaggttactcgcgtactgatggtagagacacataatgagatatatgataagttcaagcaatccacccacagcatatacatgtttttcaatacaagcgaacttagggaagccgtgcccgagcccgttttgttgtctcgcgctgagcttcgactgctgcgcctgaagctaaaggttgagcagcatgtggaactgtaccagaagtactcaaacaatagctggcgctacctatcaaacaggctcctcgccccaagcgactctcctgaatggttaagctttgatgtgaccggtgtggtccgtcagtggctctctcgcggcggggaaatcgaagggtttagattaagtgcgcattgtagttgcgattccagggacaacacattgcaagtggacattaacgggtttactactgggagaaggggggacctggctactatccatggaatgaacaggccgtttctccttctgatggctacacccctggagcgtgcacagcatctacagagctcgcgccacagacgtgcccttgacacaaactattgtttcagtagcactgaaaaaaactgttgcgtgcgccagctatacattgattttaggaaggaccttggttggaaatggatccatgagccaaaaggctatcacgccaatttctgcctgggaccctgcccctacatctggagcctggatacccagtatagtaaggtgctggccttgtacaaccagcacaacccaggagcctctgcagcaccgtgctgcgtcccccaggcactagaacctctgcctattgtctattacgttggccgtaagccaaaagtggagcaactgtccaatatgatcgttaggtcatgtaagtgcagt

SEQ ID NO: 598 - DNA, 1170 bp, Artificial Sequence
  Description of Artificial Sequence: Synthetic Transcript Sequence
atgcccccctctgggcttaggctgctgccactgcttttgccacttctatggttgctggttctgactcccggccgacccgctgctggtctttcaacttgcaagactatcgatatggagcttgtaaagcgaaagcgaattgaagcgatccggggccaaatcctgagcaaactgcgcttagcgagccctccatcccagggcgaggtgccccccggacctctgcccgaagccgtgctggctctctataatagtacccgggaccgggtggctggtgaatccgctgagccggaaccagagccagaagccgactactatgctaaagaagtgacccgggtcctcatggtagagactcataacgaaatttacgacaagttcaagcagagtacccactccatttatatgttcttcaatacaagcgaactcagggaagctgtacccgagccagttctcctcagccgggctgagttgcgactgctccgccttaagttaaaggttgagcagcacgtggagctgtatcagaaatatagcaacaatagctggaggtatcttagcaacagattgctcgctccaagtgattcccctgagtggctgagcttcgacgtcacaggagtcgtgcgccagtggctgtcccgtgggggagaaatcgagggcttccgtctctcagcccattgtagttgcgatagccgagacaacaccttacaagtggatatcaatggctttaccactggtcgcaggggggatctggcgaccattcacggcatgaaccggccgttcctcctcttgatggctactcccctggaacgggcccagcatctccagagttccagacataggcgagcgcttgataccaactattgtttttcttccactgaaaaaaactgctgcgtgcgccaactctacattgattttaggaaggatctcggttggaagtggatccatgagccgaagggctatcacgccaacttttgtttggggccatgtccgtatatttggagtcttgacacccaatactcaaaggttctggcactttataatcagcataatcctggtgctagtgctgctccctgctgcgtgccccaggcccttgagcccctgcccattgtttattacgtcggcagaaagcccaaggtcgagcagctgagcaatatgatcgttcggagctgcaaatgcagc

1. A method of inducing tolerance in a cell system to an antigen comprising contacting said cellular system with a tolerogenic composition comprising the antigen and one or more polynucleotides.

2. A method of inducing Treg cell activity in a cellular system comprising contacting said system with a tolerogenic composition comprising an antigen and one or more polynucleotides.

3. The method of claim 1, wherein said one or more polynucleotides comprises a chemically modified mRNA, said chemically modified mRNA encoding an immunomodulatory polypeptide.

4. The method of claim 3, wherein said immunomodulatory polypeptide is an antibody.

5. The method of claim 3, wherein said immunomodulatory polypeptide is selected from the group consisting of an inhibitor of mTOR, IL-2, an anti-IL-2 complex, IL-10, TGF-β, IL-35, galectin-1, IL-23, IL-27, IL-35 and IL-37.

6. The method of claim 4, wherein said antibody is specifically reactive with a member selected from the group consisting of CD3, CD40, CD40 ligand, CD4, and CTLA-4.

7. The method of claim 3, wherein said mRNA comprises at least one region which is codon optimized.

8. The method of claim 1, wherein the tolerogenic composition is formulated in a lipid nanoparticle (LNP).

9. The method of claim 8, wherein the formulated LNP composition is administered systemically.

10. A method of treating an autoimmune disease, inflammatory diseases, allograft transplant/graft vs. host disease (GVHD), diabetes or multiple sclerosis, comprising contacting a cell, tissue or organism with a tolerogenic composition comprising an antigen and one or more polynucleotides encoding a tolerogenic polypeptide of interest.

11. The method of claim 10, wherein the autoimmune disease is lupus.

12. The method of claim 10, wherein the inflammatory disease is selected from the group consisting of colitis, Chron's disease, allergic encephalitis.

13. The method of claim 2, wherein said one or more polynucleotides comprises a chemically modified mRNA, said chemically modified mRNA encoding an immunomodulatory polypeptide.

14. The method of claim 13, wherein said immunomodulatory polypeptide is an antibody.

15. The method of claim 13, wherein said immunomodulatory polypeptide is selected from the group consisting of an inhibitor of mTOR, IL-2, an anti-IL-2 complex, IL-10, TGF-β, IL-35, galectin-1, IL-23, IL-27, IL-35 and IL-37.

16. The method of claim 14, wherein said antibody is specifically reactive with a member selected from the group consisting of CD3, CD40, CD40 ligand, CD4, and CTLA-4.

17. The method of claim 13, wherein said mRNA comprises at least one region which is codon optimized.

18. The method of claim 2, wherein the tolerogenic composition is formulated in a lipid nanoparticle (LNP).

19. The method of claim 18, wherein the formulated LNP composition is administered systemically.
